(19) United States
(12) Patent Application Publication
(10) Pub. No.: US 2010/0233677 A1
(43) Pub. Date: Sep. 16, 2010

(54) FULL GENOME SEQUENCES OF HUMAN RHINOVIRUS STRAINS

(76) Inventors: Stephen B. Liggett, Clarksville, MD (US); Claire M. Fraser-Liggett, Clarksville, MD (US); Ann C. Palmenberg, Madison, WI (US)

Correspondence Address: ROYLANCE, ABRAMS, BERDO & GOODMAN, L.L.P., 1300 19TH STREET, N.W., SUITE 600, WASHINGTON,, DC, 20036, US

(21) Appl. No.: 12/703,147

(22) Filed: Feb. 9, 2010

Related U.S. Application Data
(60) Provisional application No. 61/151,302, filed on Feb. 10, 2009.

(51) Int. Cl. C12Q 1/70

(52) U.S. Cl. 435/5

(57) ABSTRACT

Infection by human rhinovirus (HRV) causes upper and lower respiratory tract disease with varying degrees of virulence. The molecular basis of diversity was examined by completing the genome sequences for all known serotypes (n=99) as well as novel field samples. Superimposition of capsid crystal structure and optimal-energy RNA configurations established the alignments. The phylogeny revealed conserved motifs, Glade-specific diversity including a potential new species (clade-D), pan-genome mutations in field isolates, and unexpected recombination that contributes to heterogeneity. A spacer tract near a 5′-UTR cloverleaf was hypervariable, and in analogy with poliovirus, may be associated with virulence. A previously unidentified configuration consistent with non-scanning internal ribosome entry may account for rapid protein translation. The data density from complete sequences of the HRV reference serotypes provided high resolution for this degree of modeling, and serves as a platform for full genome-based epidemiologic studies, for viral diagnostics and prognostics, and for antiviral compounds and vaccines.

### CROSS-REFERENCE TO RELATED APPLICATIONS

[0001] This application claims priority to U.S. Provisional Application No. 61/151,302, filed Feb. 10, 2009, which is herein incorporated by reference in its entirety.

### STATEMENT REGARDING FEDERALLY SPONSORED RESEARCH

[0002] This invention was made with U.S. Government support under National Institutes of Health Grant Number U19-A1070503. The U.S. Government has certain rights in this invention.

### BACKGROUND

[0003] 1. Technical Field

[0004] This application relates generally to the determination of the complete genomic sequence of 80 novel human rhinoviruses and to the analysis of the sequence information from these novel sequences in conjunction with sequences information from other, known human rhinoviruses.

[0005] 2. Background on Human Rhinoviruses

[0006] Human rhinovirus (HRV), the disease agent for the common cold, is responsible for ˜50% of asthma exacerbations and is one of the factors that can direct the infant immune system towards an asthmatic phenotype (J. M. Gwaltney Jr. et al., N. Engl. J. Med. 275, 1261 (1966); S. L. Johnston et al., Am. J. Respir. Crit. Care Med. 154, 654 (1996); K. G. Nicholson et al., BMJ 307, 982 (1993); D. J. Jackson et al., Am. J. Respir. Crit. Care Med. 178(7):667-72 (2008)). Direct and indirect costs from the common cold and related complications in asthmatics amount to an estimated ˜$60 billion per year in the U.S.A. (A. M. Fendrick et al., Arch. Intern. Med. 163, 487 (2003); K. B. Weiss et al., J. Allergy Clin. Immunol. 107, 3 (2001)). HRVs are single-stranded, positive-sense RNA Enteroviruses in the Picornaviridae family and have been catalogued primarily by capsid serotyping relative to a historical repository of 99 strains, obtained from clinical specimens. HRVs are classified by their use of either ICAM-1 (89 major viruses), or VLDL (10 minor viruses) as their receptor for cell entry (M. K. Cooney et al., Infect. Immun. 37, 642 (1982)). They have also been characterized by composite sensitivities across a panel of potential therapeutics (K. Andries et al., J. Virol. 64, 1117 (1990)) which have been used to parse the strains into two related drug-reactivity groups. The partial sequences of viral capsid-coding regions, non-coding regions, and a limited number of complete genomes have resulted in a division of the original 99 strains into two species: HRV-A (containing 74 serotypes) and HRV-B (containing 25 serotypes).

[0007] The naked RNA genome (no more than ˜8 kb in length) is surrounded by a capsid composed of 60 copies each of four structural proteins, denoted VP1-VP4, in an icosahedral configuration (20 triangular faces with 12 vertices). High resolution structural data reveal a star-shaped “plateau” at the 5-fold axis of symmetry, a deep depression (often termed the “canyon”) and a second protrusion at the 3-fold axis. The serotype used to classify HRVs is determined by the C-termini and connecting loops of the capsid proteins.

[0008] The HRV genome is translated as a single polyprotein, which is cleaved during translation by virus-encoded proteinases to produce 11 proteins (FIG. 5). The 5′-noncoding region exerts partial control of genome replication and translation, including a specialized motif which is an internal ribosome entry site (IRES) that directs mRNA translation by the host ribosomes. The 5′ end of the HRV genome is linked to a protein termed VPg (virion protein, genome linked) which is covalently linked at its third tyrosine residue by uridylylation. The VPg protein is virally derived from the cleaved encoded polyprotein. The 3′-UTR is highly structured and plays a role in replication and probably infectivity as well. HRVs attach to the host cell via receptors localized to the cells' surface membranes. The receptor binding site for those HRVs that bind to host-cell ICAM-1 is localized to the canyon. In contrast, it appears that the binding site for those HRVs that utilize the LDL receptor group lies at the small star-shaped dome on the icosahedral 5-fold axis (Hewat et al., EMBO J. 19(23):6317-25 (2000)). Just beneath the floor of the canyon of HRV-1a and HRV-16 is a hydrophobic pocket occupied by a lipid moiety. In contrast, the canyon hydrophobic pocket of HRV-14 is empty (Arnold et al., J. Mol. Biol. 211(4):763-801 (1990)). HRVs enter the cell by triggering receptor-mediated endocytosis, with uncoating occurring by endosomes. HRV replication requires viral RNA-dependent RNA polymerase, as well as multiple virus and host-cell derived accessory proteins. An intriguing aspect of picornavirus infections are their tendency for recombination within a cell. Poliovirus and foot-and-mouth disease virus have a recombination frequency estimated to be ˜0.9%. Since serotyping (or limited sequencing of a small region) is used in epidemiologic studies, there is no knowledge as to most of the sequence of the other HRVs, nor to the existence of additional HRVs, polymorphisms, or recombination events.

[0009] Recently, a number of new HRV-like sequences were detected in patients with influenza-like illnesses associated with severe respiratory compromise (S. R. Dominguez et al., J. Clin. Virol., 43, 219 (2008); P. McErlean et al., PLoS. ONE 3, e1847 (2008); S. K. Lau et al., J. Clin. Microbiol. 45, 3655 (2007)). The new viruses have not been cultured, but their sequences indicate they likely represent a third HRV-C species. The lack of whole-genome sequence data for the full cohort of HRVs has made it difficult to understand basic molecular and evolutionary characteristics of the viruses and has hampered investigations of the epidemiology of upper respiratory tract infections and asthma epidemics. The present invention addresses this lack of data.

### SUMMARY OF THE INVENTION

[0010] The present invention is based on the determination of the complete, novel genomic sequences of 80 human rhinoviruses (HRVs). These genomic sequences (SEQ ID NOs: 1-80) were obtained through the diligent efforts of the inventors as described herein and details concerning each of these novel sequences are provided in Table 1 (the novel sequences determined herein are marked with a double asterisk in column (1) of Table 1). The particular viruses from which the novel sequences were obtained include some of the 99 HRV serotypes maintained in the American Type Culture Collection (http://www.atcc.org) as well as 10 additional viruses obtained from field samples. The complete genomic sequences of the novel HRVs have been submitted to GenBank and the accession numbers of each of these sequences is provided in Table 1.

[0011] The present invention is further based on the analysis of the genomic sequence information obtained from the 80 novel HRVs in conjunction the published sequences of the additional 58 HRVs provided in Table 1. In a first aspect, the present invention is directed to use of this genomic sequence information in providing important and useful information concerning the structural and functional relationship between different HRV serotypes. In particular, a phylogenetic relationship based on the sequence information of the 138 HRVs listed in Table 1 was determined and is shown in FIG. 2, highlighting the relationship between the viruses. Further, a phylogenetic relationship between a subset of 55 of the HRVs was also determined based on genomic sequence data, the results of which are shown in FIG. 10. In addition, the amino acid sequences of the polypeptides encoded by the 80 novel HRV sequences were incorporated with the known amino acid sequence information of the other 58 HRVs of Table 1 to produce the amino acid sequence alignment shown in Table 5. This alignment highlights the differences and similarities between the proteins encoded by the viruses.

[0012] The structural and functional relationships between different serotypes can be used in a variety of manners including the following:

[0013] 1. Development of a diagnostic test. The individual serotype sequences may form the basis for diagnostic tests for screening individuals for HRV infections, such as through the use of a gene chip containing all of the sequences in a known pattern. A sample from a subject can be applied to the chip to determine whether the subject is infected with a particular HRV serotype. Treatment can then be tailored to the specific serotype. The skilled artisan will understand that there are a variety of means to which the sequence information, and the structural and functional information based thereon, can be used in the development of diagnostic tests. As such, diagnostic testing is not limited to the use of gene chips.

[0014] In a similar fashion, consensus sequences determined through the genetic analysis discussed herein can also be used in the diagnosis and prognosis of HRV infection. For example, a consensus sequence can be included on a gene chip with diagnostic polynucleotides for a variety of different viral and/or bacterial infections. In this manner one chip can serve as the basis for diagnosing a whole range of infections. The skilled artisan will again understand that there is a variety of means to which the consensus sequence information, and the structural and functional information based thereon, can be used in diagnostic assays. As such, diagnostic testing is not limited to the use of gene chips.

[0015] 2. Development of therapeutic agents to treat HRV infection. Information concerning structural and functional relationships between different HRV serotypes can be used in the development of therapeutics. Detailed knowledge concerning consensus sequences among serotypes, from both a functional and structural standpoint, can be used to facilitate the development of therapeutics that are effective against a large number of different serotypes. Similarly, treatments can be tailored to specific HRV serotypes based on unique properties discovered from the genomic sequence information, both polynucleotide and polypeptide sequences. Both the nucleic acid and amino acid sequences of specific serotypes, as well as consensus sequences, can be used, for example, in molecular modeling of small chemical agents that specifically target and bind the sequences, thereby disrupting the activity of the virus.

[0016] 3. Development of vaccines to prevent HRV. The amino acid sequences of specific HRV serotypes provided herein can be used to prepare vaccines against specific serotypes. Similarly, information concerning structural and functional relationships between different HRV serotypes can be used in the development of vaccines. Consensus regions of the genomic sequence and proteins encoded thereby can be targeted in a vaccine development against a large number of different serotypes. Thus, while vaccines may be developed against specific serotypes, vaccines can also be developed against different groups of serotypes. Potentially, only a small number of vaccines would need to be included in one formulation to provide protection against most or all serotypes.

[0017] 4. Following the progression of disease. There is growing evidence that asthma may be persistent if the HRV infection is slow to be, or never, cleared. Thus a test can be developed to monitor the titers of HRV from biological samples, such as nasal washes or bronchoscopy-derived fluids in patients with asthma or COPD. The results of such tests can be used to guide therapeutic decisions (e.g., anti-HRV or antibiotics for secondary infections). The knowledge gained from the genomic sequence information provided herein can be used in such tests.

[0018] Moreover, the genomic sequence information can be used to survey for mutations that occur among the general population of individuals that are being infected with HRV, such as through the use of the gene chips described above. Advance warning of mutations in particular regions can serve as the basis for developing vaccines and treatments to minimize the risk of an epidemic for serotypes causing more severe disease.

[0019] In a second aspect, the present invention is directed to the complete genomic sequence of the 80 newly sequenced HRVs (SEQ ID NOs: 1-80). These sequences are the complete genomic sequences of both previously described and newly discovered HRVs. The serotypes from which these 80 sequences were obtained and sequenced are marked with a double asterisk in the first column of Table 1. Thus, in one embodiment the present invention is directed to the genomic sequence of each of the 80 different HRVs marked with a double asterisk in the first column of Table 1. The GenBank accession number for the sequence information is provided in Table 1 as well (column (7)).

[0020] In a third aspect, the present invention is directed to the polypeptide sequences encoded by the genomic sequence of the 80 newly sequenced HRVs. As discussed herein, the genomic sequence of each HRV seroptype encodes 11 different proteins. Thus, in one embodiment the present invention is directed to each of the polypeptide sequences of each of the 80 newly sequenced HRVs. In a second embodiment the present invention is directed to polypeptide homologues having at least 95% amino acid sequence identity with each of the polypeptide sequences of each of the 80 newly sequenced HRVs. In a related embodiment, each of the polypeptide homologues has substantially the same activity as the polypeptide with which it is a sequence homologue. In a third embodiment, the present invention is directed to antibodies that specifically bind to the polypeptides and polypeptide homologues of the present invention. Preferably the antibody is a monoclonal antibody, a polyclonal antibody, or an active fragment of such an antibody.

[0021] In a fourth aspect, the present invention is directed to methods for assaying for the presence of an HRV serotype in a subject. The assay may be a diagnostic assay. The HRV serotype may be any HRV serotype, including those serotypes populated by the 138 HRVs set forth in Table 1. The diagnostic assay may be an assay for the presence of one or more HRV polynucleotide sequence, and/or the presence of one or more HRV polypeptide sequence. The assay may use a biological sample obtained from a subject. The method may be performed by obtaining a biological sample from a subject suspected of having an HRV infection and assaying the sample for the presence of one or more HRV polynucleotide sequences, and/or the presence of one or more HRV polypeptide sequences.

### BRIEF DESCRIPTION OF THE DRAWINGS

[0022] FIG. 1. Genome-wide optimal energy RNA configurations for select motifs representative of each HRV species. A) All HRV display characteristic 5′-UTR cloverleaf (CL) elements with minimal predicted structural variation (boxed sequences). B) The alignments and predicted structures of the IRES of HRVs reveal a bait-and-switch arrangement for initiation of translation. A stem-pairing AUG (light gray boxes) is found for each species, but a highly variable region of intervening sequence near the initiator AUG (dark gray boxes, white text) was noted. C) HRV 3′-UTRs have a unique unbranched stem motif prior to the poly-A tail. The left-most codon (dark gray boxes, white text) is the ORF terminator. Other boxes highlight additional terminators (light gray boxes), including a characteristic codon (light gray boxes, bold text) found in the apical loop.

[0023] FIG. 2. A neighbor-joining (NJ) phylogenetic tree showing relationships between all known HRV serotypes created on the basis of full genome sequences. The HEV-C sequences (poliovirus 1M, coxsackievirus a13, and coxsackievirus a21) were utilized as out-groups. Branch lengths are proportional to similarity (p-distance). Key nodes on this tree are annotated with NJ bootstrap values (% of 2000×). Asterisks (*) in the strain names identify sequences obtained from published data (Table 1). All other taxa are from this study. Letters in the outer rings designate whether that virus uses the major (M) ICAM-1 receptor, or the minor (m) VLDL receptor (M. K. Cooney, J. P. Fox, G. E. Kenny, Infect. Immun. 37, 642 (1982)), and whether its relative reactivity was more like group “1” or group “2” (if known) towards a panel of small-molecule antiviral compounds (K. Andries et al., J. Virol. 64, 1117 (1990)).

[0024] FIG. 3. Recombination of HRVs creates additional serotypes. A) Representative results showing that hrv-46 arose from a recombination of hrv-53 (major parent) and hrv-80 (minor parent). Shown are normalized pair-wise identities between each parent and the daughter hrv (“HRV-80 vs HRV46”; “HRV-46 vs HRV53”) and the two parents (“HRV-53 vs HRV80”). As indicated, hrv-46 nt 32-3222 are from hrv-80, and nt 3223-7200 are from hrv-53. B) Recombination with hrv-54-f05 has resulted in 7 serotype progeny. Each parental hrv is shown as a solid color. The contribution of each parent is proportional to the area of its color in the offspring. See Tables 1 and 3 for nucleotide boundaries and results from other recombination events.

[0025] FIG. 4. Whole genome amino acid sequence identity comparison. Amino acid sequences were deduced from the coding region of the sequenced Rhinovirus genome sequences. The aligned amino acid sequences were compared in a pairwise fashion to calculate the identities. The identity matrices of the compared genomes visualized in square arrays of sequence identity values were clustered by the phylogenetic ordering.

[0026] FIG. 5. An HRV genome map. A) The 5′ untranslated region (5′ UTR) is linked to VPg(3B), and encodes several important RNA structures which function during RNA synthesis and genome translation. The single open-reading frame (ORF) encodes a polyprotein, which is cleaved in a series of co-translational and post-translational reactions to provide all mature viral proteins required to establish and perpetuate an infection. The capsid proteins (1A-D) and proteins involved in replication functions (2A-C; 3A-D) are common to all HRV, and all sequences share analogous cleavage sites delineating these locations in the polyprotein. The illustrated genome is hrv-35; the base numbering system in this panel is for that sequence. B) The HRV sequences in the RNA genome alignment (data not shown) were queried pairwise at each position in the alignment. All sequences were given equivalent weight. The arithmetic average of the scores (0 or 1 for each pair) was reported for each position, re-averaged over a sliding window of 30 adjacent residues (+/−15), then plotted relative to the alignment as a whole. The strongest sequence conservation is in the 5′ IRES region. The lowest conservation is in the 5′ spacer region, upstream of the IRES, and also in the capsid coding regions, where the 1B, 1C and 1D troughs correspond to the respective, mapped immunogenic surface loops. The averaged identity across all HRVs, considering all alignment positions, is indicated with the horizontal dashed line.

[0027] FIG. 6A. Cloverleaf-like 2D RNA structures dominate the 5′ ends of all HRV genomes. A representative structure for each species is depicted. The cloverleafs bind host and cellular proteins required for the initiation of viral RNA synthesis and also aid in the regulation of ribosome entry onto the upstream IRES (internal ribosome entry site). Adjacent to the cloverleaf all HRV have a pyrimidine-rich tract. In related polioviruses, this tract binds PCBP2, a cellular factor needed for viral RNA synthesis and IRES-dependent translation. However, the specific sequence in this region is virtually unique to every known isolate of HRV, varying even among field-strains of the same serotype. Examples of the length and sequence diversity among HRVs are shown for each genus (gray boxed areas). The flanking sequences (labeled) are alignment landmarks, common to all HRVs. The 5′-most nucleotide of every picornavirus is “U” and it is linked by a tyrosine-phosphodiester bond to viral protein VPg (3B).

[0028] FIG. 6B. The RNA structures near the AUG which begins the polyprotein open-reading frame (ORF) are depicted for representatives of each HRV species. Every sequenced HRV folds this region into a similar configuration when the genome is probed by minimum-free energy calculations. The ORF AUG (white letters, dark gray boxes) is always paired with a conserved upstream AUG (light gray boxes), which marks the 3′ boundary of the IRES. Other species in the Enterovirus genus do not make similar pairings. Rather, other enteroviruses are believed to launch their ribosomes for scanning, from the upstream AUG. This HRV configuration makes it likely that an IRES-bound ribosome could readily “switch” to the ORF AUG, without scanning the intervening spacer. Between these AUGs, neither the specific sequence or its length is well conserved among HRVs. Rather, all form these related structures, preserving the specific pairings only in the region of the AUGs.

[0029] FIG. 6C. Picornavirus RNA synthesis is protein primed. The viral RNA polymerase 3Dpol, uridylylates protein 3B (VPg) to form VPg-pUpU, then uses this protein:RNA as primer for the initiation of positive and negative strand RNA synthesis. The uridylylation reaction is templated by a special RNA structure called the cre (cis-acting replication element) whose location varies for every known species of picornavirus. For the HRV-A, the cre has been mapped within the genome region encoding the 2A protein. For the HRV-B, the cre is within the 2C region. The HRV-C cre has not been mapped genetically, but common to all cres, is a distinct stem motif, displaying CAAACAA or a closely related sequence. Within the sequenced genomes of the HRV-C there are 2 locations in the 1B gene which fit this description. These, and the HRV-A and HRV-B cres are depicted. The structure is for the indicated sequence. Those bases marked with a dot are conserved among all other sequences in that species. All observed (aligned) base changes are underlined. Below each element is the protein sequence encoded by that region. Residues marked with a dot are conserved among all sequences in that species. Underlined residues are observed in at least 1 other sequence. Note: the HRV-A structure omits sequence variation contributed by the clade-D viruses. It is not yet clear whether the cre for these viruses occupies the same genome location.

[0030] FIG. 6D. Representative HRV genomes were analyzed for their minimum free-energy configurations. Within those datasets, the regions representing the 3′ untranslated regions (3′UTR) fold into motifs independent of the rest of the genome. Examples of these regions, typical of each HRV species are illustrated (ORF terminator, dark gray boxes, white letters). In every case a single stem motif dominates the region, ending exactly at the 3′ poly(A) tail, which may contribute 1-2 additional base-pairs to the bottom of the stem. Sequence conservation is poor throughout this region, but every virus, with the exception of the clade-D isolates, displays a termination codon within the terminal loop of the 3′ stem (light gray boxes marked with an asterisk). Although multiple other termination codons are scattered frequently throughout the region (light gray boxes), this particular triplet is the only one which is conserved among most of the isolates, regardless of species. The clade-D viruses (e.g. hrv-95) have shorter 3′ stems and display an UAG triplet near, but not within the terminal loop (FIG. 7).

[0031] FIG. 7. Among the HRV-A, 3 serotypes (hrv-08, hrv-45 and hrv-95) form a distinct Glade, called “clade-D”. Of these, hrv-08 and hrv-95 share >98% nucleotide identity, perhaps indicating a misidentification within the original reference collection. Despite the paucity of unique isolates in this Glade, the identified members share characteristics in certain key genome locations which clearly distinguish them from all other HRV-A sequences (or HRV-B and HRV-C). A few examples are shown in this figure. A) Near the C-terminus of the 2A protein, in a region known to contribute to substrate specificity, all clade-D viruses have an indel unique among all other HRV. B) Throughout the alignments, there are numerous locations, like this one in the 3Dpol gene, where clade-D sequences vary independently with highly variant, non-synonymous substitutions. C) The cre elements of all HRV-A are located 2A gene (see FIG. 6C). The loop sequences, especially in the essential terminal loop invariably display ACAAACAA motifs providing the template for 3D-dependent VPg uridylylation. The “G” nucleotide (boxed) displayed within the clade-D loop has not been observed in any other functional cre element. This may indicate that for this Glade, the (authentic) cre lies elsewhere in the genome, or that these particular cres have a different templated activity. D) The 3′ UTR sequences of all HRVs, with the exception of the clade-D viruses, display a conserved termination codon in the terminal 5-6 b stem loop (FIG. 6D), and moreover, there are very few examples of extended interior loops within the terminal stem. The clade-D viruses pair the conserved termination codon, near the top of the stem, and display a second, unpaired codon, within an interior loop (light gray boxes, bold letters). They are also the only sequences to have just 4 b in the terminal loop. This entire 3′ configuration is unique to this Glade, and not shared by any other HRV-A, HRV-B or HRV-C.

[0032] FIG. 8. The distribution of amino acid variations in field samples. Each field sample was aligned with the reference sample of the same serotype. Amino acid differences in the field sample are designated by color changes as identified in the key at the bottom of the figure. The upper panel portrays a diagram of hrv-14 genome structure for orientation.

[0033] FIG. 9A. The RNA genome alignment (data not shown) was augmented with additional outgroup sequences from the HEV-C species (pv21:M12197, pv31:K01392) and the HEV-B species (cvb1:M16560, cvb2:AF081485, cb3:M33854), with profile:profile fits in Clustal. A maximum likelihood (ML) tree was calculated using PHYML version 2.4.8 for the full genome dataset (“full”). TN93 nucleotide substitution model gave the best likelihood (loglk-462223) over HKY, GTR, JP69, K2P and F81 models. The Ts/tv ratio and invariable sites were estimated. Approximate likelihood ratio tests (aLRT, minimum of SH-like and Chi2-based values) and bootstrap tests (BS, 200×) were applied. The test values label the tree nodes (ratios expressed as % BS:aLRT). Tree length (sum of branch lengths) is 19.39. When compared to the FIG. 2 neighbor-joining (NJ) tree, terminal clades were collapsed if they were identical to the NJ tree. Of all considered linkages, only hrv78 and the hrv(31+47) Glade showed minor rearrangements by ML analyses relative to NJ (thin line branches). Parallel ML trees were also calculated using only the VP1, VP0, IRES or 3D-encoding RNA sequences (see Methods). Taxa names with different Glade affiliations (>0.2 p-value) on the VP0-only tree are marked with a dot. Taxa names with different Glade affiliations on VP1-only tree are boxed.

[0034] FIG. 9B. The serotype of an HRV is determined by sequences within the immunogenic surface loops of capsid proteins VP0 (VP4+VP2) and VP1. Frequently, these segments and/or the IRES and/or the 3D pol regions are sequenced separately and used to place new isolates onto HRV species trees. Established statistical methods within the program set CONSEL (V0.1i) tested the null hypothesis that the topology of such “serotype only” trees, or an IRES-only tree, or a 3D-only tree were consistent with the FIG. 9A full genome ML tree. The program output includes: the observed log-likelihood difference (obs); the p-value of the approximately unbiased test calculated from the multiscale bootstrap (au); the bootstrap probability calculated from multiscale bootstrap (np); the bootstrap probability calculated in the usual manner (bp); the Kishino-Hasegawa test (kh); the Shimodaira-Hasegawa test (sh); the weighted Kishino-Hasegawa test (wkh); and the weighted Shimodaira-Hasegawa test (wsh). The last 6 tests had identical output values for all considered trees, and are summarized together. The data, individually and collectively strongly reject the null hypotheses for all alternative tested topologies.

[0035] FIG. 9C. The five specific maximum likelihood (ML) tree topologies tested in FIG. 9B are indicated.

[0036] FIG. 10. Phylogenetic relationship between 55 of the novel HRV sequences.

### DETAILED DESCRIPTION OF THE INVENTION

[0037] The present invention provides the complete, novel genomic sequences of 80 HRVs (SEQ ID NOs: 1-80). Description information concerning these sequences is provided in the five tables included herein, with Table 1 providing the GenBank accession number (column (7)) for each of the different genomic sequences. Of the 138 different HRVs, 80 of the genomic sequences are novel (those HRVs marked with a double asterisk in column (1) of Table 1).

[0038] As discussed above, the genomic sequence information of each of the 138 different HRVs forms the basis for each aspect of the invention. The present invention is directed to use of the genomic sequence information in providing important and useful information concerning the structural and functional relationship between different HRV serotypes. In particular, a phylogenetic relationship between all known HRV serotypes based on genomic sequence data was determined and is shown in FIG. 2. Further, a phylogenetic relationship between a subset of 55 of the novel HRVs discussed above was also determined based on genomic sequence data, the results of which are shown in FIG. 10.

[0039] In a first aspect, the structural and functional relationships between different serotypes can be used in a variety of manners including: (i) development of diagnostic and prognostic tests for HRV infection, (ii) development of therapeutic agents for use in the treatment of HRV infections, (iii) development of vaccines to prevent HRV infection, and (iv) serving as a basis from which to follow the progression of disease in a subject or a population of subjects.

[0040] The skilled artisan will readily understand the wide variety of uses to which the genomic sequence information, and the structural/functional information produced from the sequence information, can be put. Without being bound by a specific group of assays, procedures or techniques, polynucleotide and polypeptides sequences, both those of specific HRV serotypes and HRV consensus sequences, can be used in gene chips for diagnostic tests, for assaying potential HRV therapeutics and vaccines, and to monitor HRV infections in individuals. Similarly, the polynucleotide and polypeptides sequences can be used in affinity columns, Southern blots, western blots and northern blots, and to design primers for whole genome sequencing of HRVs.

[0041] In a second aspect, the present invention is directed to the complete genomic sequence of the 80 newly sequenced HRVs. The serotypes from which these 80 sequences were obtained and sequenced are marked with a double asterisk in the first column of Table 1. Thus, in one embodiment the present invention is directed to the complete genomic sequence of each of the 80 different HRVs marked with a double asterisk in the first column of Table 1. The GenBank accession number for the sequence information is provided in Table 1 as well (column (7)).

[0042] In a related aspect, the present invention is directed to the individual open reading frames (ORF) contained within the 80 different genomic HRVs sequences. As discussed above, each of the single stranded genomic sequences encodes 11 different proteins. The specific boundaries of the ORFs are provided in Tables 1 and 3. The skilled artisan will readily understand how to determine the specific ORF of each of the genomic sequences.

[0043] The present invention further comprises polynucleotide homologues of each of the HRV ORFs. As used herein, the polynucleotide homologues of the present invention include those polynucleotides having at least about 70%, 75%, 80%, 85%, 90%, 91%, 92%, 93%, 94%, 95%, 96%, 97%, 98% or 99% sequence identity to any of the HRV ORFs encompassed within the genomic sequences of the HRV serotypes included herein. In one embodiment the polynucleotide homologues encode polypeptides that have substantially the same activity as the polypeptides encoded by the polynucleotides with which they are homologous (i.e., the wild-type polynucleotide). As used herein, substantially the same activity means about 100%, 99%, 98%, 97%, 96%, 95%, 90%, 80%, 70%, 60%, 50%, 40%, 30%, 20%, or 10% of the activity of the wild-type polypeptide.

[0044] In a third aspect, the present invention is directed to the polypeptide sequences encoded by the genomic sequence of the 80 newly sequenced HRVs. As discussed herein, the genomic sequence of each HRV seroptype encodes 11 different proteins. Thus, in one embodiment the present invention is directed to each of the polypeptide sequences encoded by each of the ORFs of the 80 newly sequenced HRVs. An alignment of the polypeptide sequences of the 80 newly sequenced HRVs, along with the previously disclosed polypeptide sequences of the other HRVs shown in Table 1, is provided in Table 5.

[0045] In a related aspect the present invention is directed to polypeptide homologues of the polypeptide sequences of each of the 80 newly sequenced HRVs. As used herein, the polypeptide homologues of the present invention include those peptides and polypeptides having at least about 70%, 75%, 80%, 85%, 90%, 91%, 92%, 93%, 94%, 95%, 96%, 97%, 98% or 99% sequence identity to any of the HRV peptides or polypeptides described herein. In a preferred embodiment the polypeptide homologues have substantially the same activity as the polypeptide to which they are homologous (i.e., the wild-type polypeptide). As used herein, substantially the same activity means about 100%, 99%, 98%, 97%, 96%, 95%, 90%, 80%, 70%, 60%, 50%, 40%, 30%, 20%, or 10% of the activity of the wild-type polypeptide.

[0046] In further related aspect, the present invention is directed to antibodies that specifically bind to the polypeptides and polypeptide homologues of the present invention. Preferably the antibody is a monoclonal antibody or a polyclonal antibody, including chimeric and humanized monoclonal and polyclonal antibodies, or an active fragment of such an antibody. Active fragments include single chain antibodies, Fab fragments, F(ab)₂ fragments, The skilled artisan will readily understand how to produce the antibodies of the present invention.

[0047] In a fourth aspect, the present invention is directed to assays for the presence of an HRV serotype in a subject. The assay may be a diagnostic or prognostic assay. The HRV serotype may be any HRV serotype, including those populated by the 138 HRVs set forth in Table 1. The diagnostic or prognostic assay may be an assay for the presence of one or more complete or partial HRV genomic sequence, including specific ORFs or portions thereof, and untranslated regions or portions thereof. The diagnostic assay may further be an assay for the presence of one or more HRV polypeptide sequences, or one or more portions of an HRV polypeptide sequence. The assay may use a biological sample obtained from a subject. As used herein, the biological sample obtained from a subject may be any biological sample that could contain some amount of an HRV polynucleotide or HRV polypeptide. The biological sample can be, for example (but is not limited to), nasal wash, nasal discharge, nasal scraping, nasal epithelial sampling (q-tip, spatula, etc.), tracheal wash, bronchial wash/lavage, bronchial epithelial biopsy, bronchial epithelial brushing, bronchial smooth muscle biopsy, bronchoalveolar lavage or lung biopsy. As used herein, “subject” is intended to mean an animal, such as mammals, including humans and animals of veterinary or agricultural importance, such as dogs, cats, horses, sheep, goats, and cattle. The biological sample can also be from tissue culture cells that have been infected with a biological sample from a subject, which allows-for replication of the HRV to produce larger amounts of virus for subsequent studies.

[0048] In other aspects of the present invention the HRV genomic sequence information, and the structural and functional information derived therefrom, both that described herein and that later developed from the sequence information, can be used in the diagnosis, prognosis, treatment, and surveying of a number of different diseases including: rhinitis, sinusitis, common cold, upper respiratory tract infection, otitis media, asthma, pneumonia, asthma (where HRV is a causative agent), asthma exacerbation (where HRV infection is not the causative agent but instead exacerbates the condition), persistent asthma (where uncleared HRV infection causes persistent asthma), and chronic obstructive pulmonary disease (COPD) exacerbation (where HRV infection is not the causative agent but instead exacerbates the condition). That is, the HRV genomic sequence information, and the structural and functional information, can be used in developing screening assays, means for treatment and therapy, means for prevention and prophylaxis, and means for monitoring disease progression in a number of diseases caused by or related to different HRV serotypes.

[0049] Thus, the skilled artisan will readily understand and appreciate that the genomic sequence information, and the structural and functional information derived therefrom, can be used in a large number of different manners, both those contemplated and discussed herein, and those that may be later developed.

[0050] I. HRV Genome Sequencing

[0051] To define the extent and nature of human rhinovirus (HRV) diversity and evolution, the genomes for every previously HRV that did not have full genome sequence in the reference repository were sequenced, completing the full set of 99 serotypes, as well as 10 new field samples (Table 1). Full (or complete) genome sequences is defined as the contiguous sequence without gaps from the first (or nearly first) nucleotide to the last (or nearly last) of the HRV genome. Modifications (A. Djikeng et al., BMC Genomics 9, 5 (2008)) were made to the sequence-independent, single-primer amplification (SISPA) method (see below) in order to determine the complete genomes of 70 HRVs from the reference repository, as well as 10 nasal wash samples from patients with HRV upper respiratory tract infections. The viruses were sequenced at an average of 6× complete coverage for each of the ˜7 kb genomes.

[0052] II. HRV Genome Analysis

[0053] To provide accuracy for determining the differences and commonalities between HRVs, and the phylogenetic relationship between these organisms with relatively small genomes and (often) high degrees of sequence similarity, a stringent approach was taken for aligning the sequences. The initial sequence fits for the polyproteins were performed on the basis of superimposition of the amino acid sequences within virion crystal structure maps (A. C. Palmenberg, J.-Y. Sgro, in Molecular Biology of Picornaviruses, B. L. Semler, E. Wimmer, Eds. (ASM Press, New York, 2001)) and supplemented with additional structure data from other viral proteins. In a step-wise manner, profile hidden Markov models (HMM) augmented the founder set with the remaining sequences (see below). The published sequences (including redundant determinations) for the remaining serotypes were added so that the final collection consisted of 138 full-length HRV genomes, including at least 1 representative for each of the 99 original strains, 10 field samples, and 7 HRV-C strains (Table 1).

[0054] Regardless of species, all HRVs were found to have similar average base compositions. They are rich in A (31-34%) and U (25-30%), but low in G (19-22%) and C (18-22%). The third codon positions have the highest composition skew. An identity matrix prepared for the polyproteins (FIG. 4) shows that the average amino acid identity between pairs of HRV-C strains were slightly more diverse (78% identity, range 68% to 95%), than among the HRV-A (80%, range 64% to 99%) or HRV-B (83%, range 75% to 97%). Table 5 provides an amino acid sequence alignment of each of the serotypes set forth in Table 1. The lack of broader diversity suggests all HRVs are in a stable status for maintaining selection for certain traits, yet still have mutational flexibility for escape from immune responses.

[0055] HRVs encode a single open reading frame (ORF) representing about 90% of the RNA length. Translation produces a polyprotein that is subsequently cleaved in a viral protease-dependent cascade to form the 11 mature viral proteins required to initiate and sustain an infection (FIG. 5A). Local and global RNA structures play established roles in HRV biology, however the extent, character, and relatedness, of serotype-specific 5′- and 3′-UTR variation are unknown. The role of this variability has thus not been related to function by modeling techniques or in vivo approaches. The alignment methods herein included optimal energy RNA structure considerations (A. C. Palmenberg, J.-Y. Sgro, Seminars in Virology 8, 231 (1997)) and were therefore sensitive to potential differences amongst the HRVs in the 5′- and 3′-UTRs.

[0056] HRV RNA Structures. All enteroviruses encode 5′-terminal cloverleaf-like motifs (CL) which bind viral and cellular proteins for the initiation of RNA synthesis and also help convert infecting genomes from translation to replication templates. The HRV CLs (80-84 b) were predicted in every sequence with minimal structural variation among the species (representative structures are shown FIG. 1A and additional structures in FIG. 6A). Immediately 3′ to the CL, all HRVs were found to share an unusual pyrimidine-rich spacer segment with short oligo(C) and oligo(U) units interspersed with As (gray boxes, FIG. 1A and FIG. 6A). The HRV-A have the shortest tracts (11-22 b) and HRV-B the longest (22-50 b). Nearly every HRV displayed a unique sequence in this region, and unexpected variations were identified even among isolates of the same serotype (FIG. 1A and FIG. 6A). The equivalent genome location in poliovirus (10 b) interacts with poly(C)-binding protein 2 and is involved in the determination of the polio neurovirulent potential. The analogous regions in aphthoviruses or cardioviruses have homopolymeric poly(C) or poly(UC) tracts, the deletion of which significantly attenuates the virus through a PKR activation-dependent mechanism (L. R. Martin, G. M. Duke, J. E. Osorio, D. J. Hall, A. C. Palmenberg, J. Virol. 70, 2027 (1996)). If the HRV 5′ spacer tracts are functional analogs to those of these other picornaviruses, then it is possible that the pathogenic potential of an individual HRV may also be encoded, in part, by this region.

[0057] Picornaviruses use internal ribosome entry sites (IRES) to mediate translation initiation of their polyprotein ORFs. The IRESes of all enteroviruses (termed Type-1 IRESes) are thought to bind 40S subunits internally within their 5′-UTR, and to then scan additional nucleotides to find the proper initiator AUG (R. J. Jackson, in Translational Control, W. B. Hershey, M. B. Mathews, N. Sonenberg, Eds. (Cold Spring Harbor Laboratory Press, 1996)). Modeling of the known serotypes confirmed that all HRV IRESes start just 3′ to the pyrimidine-rich spacer tract. The internal IRES sequences were found to be highly conserved with an average nucleotide identity of 82%. Indeed, this region of the genome has the greatest degree of identity among all HRV (FIG. 5B), exceeding >95% for regional motifs within the IRES. However, it was also observed that the dominant IRES sequence conservation did not extend completely to the initiator AUG and for that the 18-40 bases 5′- to this codon, the region scanned by ribosomes, there was little species-specific conservation (<60% nucleotide identity). Despite this, the folding predictions configured every one of these regions into virtually the same RNA motif suggesting that this structure is conserved even when the underlying nucleotides are not (FIGS. 1B and 6B).

[0058] Near the bottom of a long (15-20 bp) minimum energy unbranched stem, the ORF AUG was invariably paired with a conserved upstream non-coding AUG (light gray boxes, FIG. 1B), marking the 3′ boundary of the IRES, and the normal launch point for 40S scanning. Every HRV genome fold maintains this pairing. It was predicted that HRVs use the proximity of these AUGs to orient the 40S for direct transfer to the proper codon, without the need for scanning through the intervening nucleotides. The sequence and length variation between the AUGs was consistent with the idea that ribosomes would by-pass this region entirely, if they jump from one AUG to the other. This IRES folding is essentially a bait-and-switch mechanism which was predicted to potentially enhance HRV translation competitiveness. This paired AUG motif is unique to HRV and is not found in other enteroviruses (e.g., poliovirus).

[0059] The HRV 3′-UTRs (40-60 b) begin with the ORF termination codon and extend to the genetically-encoded poly(A) tail. The ORF terminators themselves (dark gray boxes in FIG. 1C and FIG. 6D) included UAG, UAA and UGA codons. The codon selection often differed among isolates from the same serotype. Multiple additional terminators (light gray boxes), in and out of the ORF, were identified that punctuated each segment (3-9 per UTR). Despite large differences (>40%) in nucleotide identity (FIG. 1C), it was noted that all HRV maintain a 13-16 by unbranched stem, covering 67-88% of the 3′-UTR, immediately abutting the poly(A) tail (see also FIG. 6D). Some 3′ stems have small interior loops, but nearly all, except for the unusual sequences of clade-D (see below), present 5-base terminal loops, anchored with apical U-G or U-A pairs. Inevitably, the 3′ sides of these terminal loops display UAG or UGA terminator codons, which may or may not synchronize with the local ORF. The function of these 3′ stems is unknown, but such conservation is usually indicative of a putative protein recognition motif (such as translation termination factors), or alternatively, an RNA:RNA tertiary interaction between the terminal-loop segment and a different (unknown) region of the genome.

[0060] Phylogenetic Relationships of the HRV. Multiple methods were used to compute and compare phylogenetic trees for the aligned RNA and protein data. FIG. 2 is a neighbor-joining consensus tree (K. Tamura, J. Dudley, M. Nei, S. Kumar, Mol. Biol. Evol. 24, 1596 (2007)), which considered the 5′- and 3′-UTRs and the first and second codon positions for the RNA genomes. All major nodes of the tree topology were stable over a range of calculation parameters, regardless of whether they invoked minimum evolution, parsimony, UPGMA, or maximum likelihood (ML) methods (see FIG. 9A for ML tree with bootstrap, likelihood ratio tests, and comparison to the neighbor-joining tree). Statistical comparisons were performed between the ML tree generated from the full genomes, and ML constrained-topology trees generated from capsid sequences that have been used as a surrogate for serotypes (see Methods and FIGS. 9A-C), with the null hypothesis being that the topologies of these limited-sequence trees were the same as the full genome-based tree. The approximately unbiased test calculated from the multiscale bootstrap (au) P-values for the capsid VP1 and VP0 trees were <10⁻⁶⁹, strongly rejecting the null hypothesis. In a similar manner, ML constrained-topology trees generated from IRES, and, 3D-polymerase, sequences were not consistent with the full genome tree (FIGS. 9A, 9B). Additional statistical tests also confirmed these results from the au (FIGS. 9B, 9C) for all four of the constrained-topology trees. Taken together, these results suggest that trees based on sequences from small, albeit biologically important, regions of the HRV genome have a limited capacity to reflect the evolutionary relationships and underlying diversity of HRVs. The tree shown in FIG. 2 also accurately represents parallel calculations on the aligned polyprotein dataset (p-distances differed by <2%). Thus the tree shown in FIG. 2 reveals relationships between the HRVs that have never previously been shown. All aligned full-length sequences contributed to the tree calculations, but published sequences (noted with asterisks on FIG. 2) are shown only as needed, to complete the cohort of reference serotypes (were the redundant published sequences illustrated, without exception they would lie on the same-serotype branches, with p-distances <0.5%). The outer rings of this figure designate major (M: ICAM-1) or minor (m: LDLR) receptor preferences, and also each strain's small-molecule drug reactivity group (“1” or “2”) (K. Andries et al., J. Virol. 64, 1117 (1990)). The tree is shown rooted with three outgroup sequences from the Human Enterovirus C species (poliovirus lm, coxsackieviruses a13 and a21), but of note, the use of five additional outgroups had no effect on overall tree topology or HRV p-distances (FIG. 9). The new field samples (i.e., f01-f10) were assigned tentative serotype names, based on capsid similarity relative to the known reference strains. While some of the full genomes from these samples proved close to their repository cognates, a divergence in sequence for several strains was noted (see below).

[0061] According to the tree(s), HRV-A and HRV-C share a common ancestor, which is a sister group to the HRV-B. Although the HRV-C Glade currently has only seven full sequences, its genetic origin is clearly different from the reference set, and the phylogeny indicates that these represent a third HRV species, as has recently been recommended to the International Committee on the Taxonomy of Viruses (on the basis of these data, the International Committee of Taxonomy of Viruses Picornavirus Study Group recently proposed to recognize them as a new species (Nick Knowles, personal communication)). The HRV-C have yet to be cultured or assessed for immunological cross-reactivity, but the sequence space occupied by the available samples suggest that there may be many additional HRV-C strains awaiting discovery. Distance extrapolations relative to the new full reference cohort, predict the HRV-C may have an even broader range of serotypes than the original 99, of which each confers only limited immunologic cross-protection to another.

[0062] A separate phylogenic finding was the unexpected basal divergence within HRVA of a small (n=3) group of distinct strains, denoted clade-D (hrv-80 and hrv-95 are designated as two different serotypes by ATTC, but differ by ˜150 nucleotides, perhaps indicating a misidentification in the repository)). Although the major basis for discriminating clade-D from other HRV-A lies in their general, genome-length sequence divergence, these particular isolates have RNA elements, such as the cis-acting replication element, the 3′-UTR terminal loop feature (see above and FIG. 6), and local indels and sequence motifs, that are somewhat atypical of other HRV-A strains. Some of the distinguishing characteristics are highlighted in FIG. 7. Among all other major A clades, and major B clades, none have p-distances (>10%) which segregate them so distinctly. Clade D has cautiously been proposed as a fourth species (HRV-D), but the phylogenetic evidence (FIG. 2) and sequence characteristics (FIGS. 6, 7) are highly suggestive. Other early topological divisions within HRV-A separates a major Glade composed of 10 serotypes (counterclockwise, hrv-20 through hrv-12) from a second grouping comprised of ˜12 mini-clades representing 61 serotypes (counterclockwise hrv-89-f09 through hrv-100). These particular relationships were not appreciated when only partial genome sequences (e.g., VP1 or VP4/VP2) were examined (R. M. Ledford et al., J. Virol. 78, 3663 (2004); C. Savolainen, S. Blomqvist, M. N. Mulders, T. Hovi, J. Gen. Virol. 83, 333 (2002)). FIG. 9 shows a comparison of results from trees constructed with whole genomes, VP4/VP2, and VP1 sequence. Neither of the trees derived from the limited sequences revealed the miniclades, clade-D, and multiple other features. Arguably, comparison of full genome data, the context wherein evolutionary events occur, provides the most complete relationship description among the HRVs and allows more accurate historical extrapolations. The phylogenetic diversity described at the whole genome level is consistent with the clinical heterogeneity of HRV infections in humans (J. M. Gwaltney, Jr., J. O. Hendley, G. Simon, W. S. Jordan, Jr., N. Engl. J. Med. 275, 1261 (1966); K. G. Nicholson, J. Kent, D. C. Ireland, BMJ 307, 982 (1993); D. J. Jackson et al., Am. J. Respir. Crit. Care Med. 178, 667 (2008)), although mapping specific clinical characteristics (i.e., incubation period, severity, respiratory compromise, pro-asthmatic phenotypes) to responsible genomic regions will require additional field isolates from a large number of patients with multiple traits. Given the genome-wide diversity that has been documented (5′ spacer elements, ORF start, protease, 3′-UTRs, etc.) clinically relevant relationships may well depend on comparisons from multiple genome regions in addition to the capsids.

[0063] Recombination in HRV. Earlier sequencing reports with a subset of HRV reference genomes concluded that RNA recombination was not a major mechanism for HRV diversity (A. L. Kistler et al., Virol. J. 4, 40 (2007); P. Simmonds, J. Virol. 80, 11124 (2006)), and asserted that known isolates were independently segregating entities. The potential for recombination has been re-evaluated herein by scanning the full reference set and the new field strains with a suite of recombination detection programs (D. Martin, E. Rybicki, Bioinformatics 16, 562 (2000)) relying on phylogenetic distance and sequence similarity. Stringent criteria (probability P value of <0.00001 from 2 or more analyses modes), identified 23 genomes with probable origins resulting from at least twelve independent recombination events. FIG. 3A shows representative data indicating that hrv-46 arose by recombination between hrv-53 (major parent) and hrv-80 (minor parent). Within the hrv-46 genome, nucleotides 32 to 3222 are most similar to hrv-80, while the rest of the genome (nt 3223 to 7200) is common to hrv-53. The result is consistent with this trio's computed phylogenetic relationship (FIG. 2), placing the major parent (hrv-53) and the daughter (hrv-46) in the same Glade, and the minor parent (hrv-80) in a different, nearby Glade. Results for all 23 identified recombination scenarios are summarized in Table 2.

[0064] Supportive information and additional statistics are provided in Table 3. Of the recombination locales suggested by these events, the majority (10 of 12) involve the 5′-UTR or the adjacent capsid genes, which seemingly have been collectively rearranged to produce at least 20 separate progeny strains. Among the 138 full-length sequences, hrv-54 (or its ancestor) was apparently the most active in recombination. Field strain hrv-54-f05 links closely to three separate events (see FIG. 3B), contributing to at least seven different serotype progeny. In confirmation studies, a progressive alignment method was used for the HRV genomes (see below) and then the suite of recombination detection programs was repeated. Of the 23 recombination events based on the HMM alignment (Table 2), 19 were also found after the progressive alignment, although in some cases different major and/or minor parents were selected from within the same closely related Glade (see Table 1).

[0065] While the sequence fingerprints clearly trace these ancestral patterns, nevertheless all extant progeny also showed evidence of subsequent sequence divergence within the exchanged regions. Recombination was not identified between isolates from different species (i.e., HRV-A and HRV-B), but receptor binding preferences between ICAM and LDLR apparently presented no barriers to exchange. Major group hrv-54 and minor group hrv-29, for example, both contributed to the common ancestor of the minor group viruses, hrv-31 and hrv-47. These results, particularly for HRVs with different receptor preferences, and those from distant clades, such as the parents hrv-21 and hrv-65, suggests that co-infection of the host with multiple parental strains is not uncommon, and may lead to variant progeny with different biological properties. The field isolates also deviated from the reference sequences in a manner that was not confined to any specific portion of the genome. In fact, field strain deviation relative to the reference isolates (for example, hrv-52-f01 vs hrv-52 differ by 838 nucleotides) was frequently greater than that observed between pairs of characterized serotypes (hrv-44 and hrv-29 differ by 385 nucleotides). Indeed, field samples of the same serotype collected from the same geographical region within one year showed marked variability (Table 4 and FIG. 8). The propensity for such variation could underlie the marginal, or lack of efficacy of anti-HRV therapeutics in clinical trials (R. Fleischer, K. Laessig, Clin. Infect. Dis. 37, 1722 (2003); D. L. Barnard, Curr. Pharm. Des. 12, 1379 (2006)). Given the reference set of full genomes, along with the means to rapidly sequence full genomes from field samples, new strategies may become apparent to engineer Glade-specific agents by targeting their commonalities.

[0066] In summary, the data complete and define the full set of genome-length sequences in the canonical reference repository of 99 HRV-A and HRV-B serotypes. Alignment and examination of these genomes confirmed species-specific sequence and RNA structural elements which differentiate the HRV-A and HRV-B from newly described HRV-C, and further suggest the HRV-A harbor a distinct, uncharacteristic Glade, which may represent a fourth species (HRV-D). Local sequence variation particularly in the 5′-UTR, characterized each isolate within regions associated with the pathogenic potential for other picornaviruses. Parallel RNA structure comparisons defined several 5′ and 3′ elements as common to all isolates, and unique to the HRV. Motifs like the AUG-presenting 5′ ORF initiation stem, or the UAG-presenting 3′ stem, may contribute to HRV-specific IRES translation mechanisms, ORF termination, or polymerase recognition. It was also found embedded within multiple sequences, including recent field isolates, clear evidence for repeated, historical genome recombination. Co-infection with multiple HRVs is known to occur (C. Savolainen, M. N. Mulders, T. Hovi, Virus Res. 85, 41 (2002)), and it is now known that this can lead to unique strains that may have distinct biologic properties and clinical characteristics. The required host environment for HRV recombination is not known, but with complete genome sequences from additional patient isolates such factors may become apparent. The repository dataset provides a baseline framework for the analysis of additional HRVs that may be in communities, including the HRV-Cs, and will enable larger scale studies of basic molecular and evolutionary characteristics and assignment of disease phenotypes to specific genome regions. Indeed, the recombinations and mutations found in all regions of these genomes suggest that future HRV epidemiologic studies might benefit from full genome sequencing rather than the more limited serotyping. With such an approach, correlations may be more informative in inferring pathogenic potential, and in designing antiviral agents and vaccines.

[0067] III. Experiments

[0068] A. HRV Samples and Preparation of Viral Nucleic Acids

[0069] The HRV reference repository was considered to include all unique HRV serotypes available from American Type Culture Collection (http://www.atcc.org). These amounted to a total of 99 HRVs, as the previously designated “HRV-Hanks” is now considered hrv-21, hrv-87 is now classified as a strain of EV-86, a serotype within the human enterovirus D species, and hrv-1b and hrv-1a are now considered hrv-1. One described HRV serotype (hrv-57) was not available from ATCC and a field sample was utilized whose sequence was consistent with regions of the hrv-57 genome that had been previously reported and this is referred to as a reference sample. Additional field samples were obtained from the Wisconsin State Laboratory of Public Hygiene, collected from 2005-2006. These isolates were amplified in HeLa cells, the virus was concentrated, then snap frozen. Full genome sequencing was performed as described below with 10⁵-10⁶ virions from the contents of one vial of frozen virus provided by the aforementioned sources. Briefly, viral RNA and DNA was prepared in a manner previously described in detail (A. Djikeng et al., BMC Genomics 9, 5 (2008); T. Allander, S. U. Emerson, R. E. Engle, R. H. Purcell, J. Bukh, Proc. Natl. Acad. Sci. U.S.A. 98, 11609 (2001); T. Allander et al., Proc. Natl. Acad. Sci. U.S.A. 102, 12891 (2005)) with minor modifications. Each biological sample was first spun to remove cellular debris and processed through a 0.22 μM filter to enrich viral particles in the flow-through while retaining bacteria and other cells in the filter. To eliminate residual nucleic acid contaminants in the filtrate, 100 units of DNAse I and 3 μg RNAse A were added to the viral resuspension, followed by incubation at 37° C. for 1 hour. RNA was extracted with Trizol-LS reagent (Invitrogen, Carlsbad, Calif.) according to the manufacturer's instructions. The RNA pellet was resuspended in 20 μl of nuclease-free water.

[0070] B. Construction of a Library of Random PCR Fragments and Sequencing

[0071] The extracted RNA was processed as previously described (1-3). Briefly, 800 ng of purified RNA was reverse-transcribed with SSII Reverse Transcriptase (Invitrogen) using the FR26RV-N primer (5′ GCC GGA GCT CTG CAG ATA TCN NNN NN 3′; SEQ ID NO: 81) at a concentration of 1 μM. In addition, primer FR40RV-T (5′ GCC GGA GCT CTG CAG ATA TC (T)20 3′; SEQ ID NO: 82) was added at a concentration of 5 nM to specifically amplify the polyadenylated 3′ end. The second strand was synthesized by addition of Klenow exo-polymerase (New England Biolabs, Ipswich, Mass.) in the presence of the FR26RV-N random primer. To capture the 5′ end, the Klenow reaction was supplemented with 10-30 nM of primers FR30RVA (5′ GCC GGA GCT CTG CAG ATA TC TTA AAA CTG G 3′; SEQ ID NO: 83) and FR30RVB (5′ GCC GGA GCT CTG CAG ATA TC TTA AAA CAG C 3′; SEQ ID NO: 84) where the final 10 bp match the 5′ ends of A-type and B-type rhinoviruses, respectively.

[0072] PCR amplification used high fidelity Taq Gold DNA polymerase (Applied Biosystems, Foster City, Calif.) with the FR20RV primer (5′ GCC GGA GCT CTG CAG ATA TC 3′; SEQ ID NO: 85). PCR amplicons were A-tailed with dATP and 5 units of low fidelity DNA polymerase (Invitrogen) at 72° C. for 30 minutes. A-tailed PCR amplicons were fractionated on a 1% agarose gel and fragments between 500 and 1000 nt were extracted. Amplicons were ligated en masse into the Topo TA cloning vector (Invitrogen) and transformed into competent one-shot Topo top 10 bacteria (Invitrogen). Cells were plated on LB/Amp/XGal agar, and individual colonies were picked for sequencing. The inserted fragments were sequenced bidirectionally with the M13 primers from the Topo TA vector. A total of 192 fragments or more were routinely sequenced per library. Sequencing reactions were performed at the Joint Technology Center, Rockville, Md., on an ABI 3730×1 sequencing system with Big Dye Terminator chemistry (Applied Biosystems).

[0073] C. Assembly of Viral Genomes

[0074] Sequence reads were downloaded, trimmed to remove primer sequence as well as low quality sequence, and assembled with the program ELVIRA, the Executive for Large-scale Viral Assembly (http://sourceforge.net/projects/elvira). Additional manual inspections identified ambiguities or potential single nucleotide variants and were interrogated by further RT-PCRs, cloning, and sequencing. To close gaps between assembled contigs, strain-specific primers were utilized. Additional primer design, cDNA synthesis and sequencing were performed to ensure at least 4× sequence coverage along all genomes.

[0075] D. Polyprotein and RNA Genome Alignments

[0076] Founder data for the HRV polyprotein alignment are from superimposition of virion crystal structure hydrogen-bonding maps as described (A. C. Palmenberg, J.-Y. Sgro, in Molecular Biology of Picornaviruses, B. L. Semler, E. Wimmer, Eds. (ASM Press, New York, 2001)). Profile hidden Markov models, derived from the founder data, were progressively augmented with published sequences and those derived from this study. The HMMER program suite (Accelrys, San Diego, Calif.) reported both high and low road fits, building the alignment possibilities with additions from highest to lowest similarity. Each insertion and deletion (indel) in the output iterations was examined and eased within the confines of its high road and low road fits, to maximize conservation of viral cleavage sites, catalytic sites, determined structure landmarks (P1, 2A, 3B-3D) and sequence similarity. The HMM profile of composite HRVs was used to fit three additional HEV-C out-group sequences into the final alignment. Reverse translation of the polyprotein alignment relative to the original RNA sequences formed a core ORF alignment with analogous indels. Preliminary tree-building exercises identified 20 sequences representative of the dominant HRV clades, including three examples from the putative HRV-C species. The complete genome of each select sequence was analyzed separately by mFOLD (A. C. Palmenberg, J.-Y. Sgro, Seminars in Virology 8, 231 (1997)). The consensus topography (optimal plus 100 suboptimal structures) for each the 5′ and 3′ regions of each fold was superimposed into common alignments which maximized analogous base-pair superimposition (5′ cloverleaf, IRES, 3′ stems, etc.) and minimized indels. These foundations were converted into HMM profiles to which the remaining UTR sequences of all HRV and out-groups were fit. In the interest of alignment length, the HEV-C out-group sequences were truncated to remove a 5′ fragment without analog in the HRV (100 b ribosome read-through, 5′ to ORF AUG). The 5′, ORF and 3′ aligned segments for all included sequences were joined contiguously into full-length genome alignments. Again, each indel in the file was re-examined for plausibility, consistency and biological conservation, before the composite alignment was finalized.

[0077] E. Phylogenetic Analysis

[0078] Phylogenetic analyses on the polyprotein and genome alignments (msf file format) were conducted with MEGA version 4 (K. Tamura, J. Dudley, M. Nei, S. Kumar, Mol. Biol. Evol. 24, 1596 (2007)) and PHYML version 2.4.5 (S. Guindon, O. Gascuel, Syst. Biol. 52, 696 (2003)). HRV sequences from this study (including field strains) were augmented as needed with published data to include at least one representative of the 99 described HRV-A and HRV-B serotypes, and all available (full-length) data from the HRV-C. Multiple tree iterations were evaluated for both the protein (single gene and polyprotein) and RNA genome data, with UPGMA (MEGA), maximum parsimony (MEGA), neighbor joining methods (MEGA) with bootstrap tests (2000×), and maximum likelihood (PHYLM) with approximate likelihood ratio tests (minimum of SH-like and Chi2-based aLRT). None of these methods showed significant topological differences for major branch points with p-values >2 (i.e., 2% change), especially if the 3rd positions of the ORF codons were omitted from consideration in the RNA trees.

[0079] In the absence of full-genome data for all reference strains, HRV relationships have been approximated according to more limited sequence sets derived from the VP1, VP0, IRES and 3D regions. To determine whether “serotype” (i.e., VP0 or VP1 sequences) and/or other more conserved regions of the genomes (i.e., IRES or 3D gene) were useful indicators of full strain relationships, defined maximum likelihood (ML) topologies, optimal for these regions were compared statistically with the ML full-genome tree. Optimal ML topologies for the VP1-only (966 b), 3D-only (1389 b), IRES-only (547 b) and VP0-only (86 b VP4+352 b VP2) fragments within the RNA alignment were computed within PhyML, then compared individually against the optimal topology of the full-genome ML tree using PAML and the CONSEL (V0.1i) suite of programs (Shimodaira et al., Bioinformatics 17, 1246 (2001)). The tested (null) hypothesis was the expectation that HRV strains would cluster in reasonable approximations of the full genome data, using only these limited (albeit commonly used) regions of sequence. See also the legends to FIGS. 9A, 9B for specific definitions of the implemented topology tests.

[0080] F. 5′- and 3′-Structural Predictions

[0081] The accepted notion that thermodynamically derived models for phylogenetically related viruses should exhibit common RNA structural motifs, if such motifs are required for biological activity, was considered. The approach herein has been previously described in detail (A. C. Palmenberg, J.-Y. Sgro, Seminars in Virology 8, 231 (1997)). Briefly, rather than form structure predictions on the basis of sequence similarities, folding was undertaken first, and then a searched was conducted among the most probable configurations (energy minimization) for regions with consistent structures. As described above for the RNA alignments, full genome sequences for 20-40 hrv, representing different phylogenetic clades, were evaluated in their entirety by mFOLD (A. C. Palmenberg, J.-Y. Sgro, Seminars in Virology 8, 231 (1997)) asking for the optimal, and up to 100 closely related (+12 Kcal) suboptimal configurations. Without exception, the consensus fold for each sequence (required >80% of queried connect files) agreed that the 5′ and 3′ ends of each RNA generally configured independently. That is, few if any segments within these regions made preferred (low energy) long-range contacts with interior portions of the genome. The UTR topologies folded regionally as a series of local, connected motifs. This tendency was confirmed by assessing the P-num values, computed for the whole-genome folds. The pairing number (Pnum) is a quantitative measure of the propensity of any given base to become involved with the same or alternative pairing partners in a collection of suboptimal folds. It has been shown for other viral sequences that low P-num bases and their correlate partners usually dominate the most important helices and stems supporting biologically significant motifs, especially within the lowest energy configurations. These bases and their partners were therefore used to identify and align true homologues (functional analogues) at the primary sequence level, even in regions with less-than obvious conservation. Superimposition of the 5′ and 3′ low P-num motifs from the genome folds formed the core consensus profiles for the RNA alignments in these regions (as described above) and also identified multiple specific conserved motifs throughout the genomes. Once these commonalities were identified for the 5′ cloverleaf, IRES, 5′ ORF initiation stem, cre element, and 3′-UTR, all other sequences in the alignment were re-folded in these regions (mFold, with 50 suboptimals), to confirm that they too had similar, conserved, low energy, low P-num motifs.

[0082] G. Recombination Analysis

[0083] The recombination predictions of the genomic sequences, aligned as described above, were conducted with a suite of programs within the RDP3 package (D. P. Martin, C. Williamson, D. Posada, Bioinformatics 21, 260 (2005)). The individual programs RDP (D. Martin, E. Rybicki, Bioinformatics 16, 562 (2000)), Bootscan (M. O, Salminen, J. K. Carr, D. S. Burke, F. E. McCutchan, AIDS Res. Hum. Retroviruses 11, 1423 (1995)), Maximum X2 (J. M. Smith, J. Mol. Evol. 34, 126 (1992)), Chimaera (D. P. Martin, C. Williamson, D. Posada, Bioinformatics 21, 260 (2005)), SiScan (M. J. Gibbs, J. S. Armstrong, A. J. Gibbs, Bioinformatics 16, 573 (2000)) and 3Seq (M. F. Boni, D. Posada, M. W. Feldman, Genetics 176, 1035 (2007)), were implemented for the analysis. Since no single program provides optimal performance under all conditions, any event supported by evidence from two or more analyses with P-values <0.00001 was considered a result consistent with recombination. Potential recombination events were also assessed by phylogenetic analysis, breakpoint polishing and alignment consistency checks. For each individual program, default settings were used except as specified: RDP, internal reference only, window size for recombination, 100 by with step size 10 bp; GENECONV, G-scale was set as 3; BootScan, number of bootstrap replicates, 200, window size, 100 bp, step size, 10 bp, model options: Jukes and Cantor, 1969; Maxichi, variable window size was used, strip gap was selected; SiScan, window size, 100 by with step size 10 bp, P-value permutation number was set as 1000. In additional analyses, to confirm the recombinations that were found, genomic sequences were aligned using progressive alignment methods (C. Notredame, D. G. Higgins, J. Heringa, J. Mol. Biol. 302, 205 (2000)). Briefly, the progressive alignments were performed with non-coding (R. C. Edgar, Nucleic Acids Res. 32, 1792 (2004)) and coding regions (C. Notredame, D. G. Higgins, J. Heringa, J. Mol. Biol. 302, 205 (2000); M. Suyama, D. Torrents, P. Bork, Nucleic Acids Res. 34, W609-W612 (2006)) using the referenced programs and the alignments were concatenated by a custom script. The subsequent final alignment was utilized for recombination predictions using the RDP3 package as described above.

[0084] IV. Determining HRV Serotype in a Patient Sample

[0085] A sample from a patient, e.g., a sample from the respiratory tract (e.g., nose, mouth, larynx, trachea, bronchi, or alveoli), eyes, ears, blood, urine or stool, or from a culture derived from these samples, is sequenced, e.g., using a sequence-independent random priming method well-known in the art (A. Djikeng et al., BMC Genomics 9, 5 (2008); A. C. Palmenberg et al., Science 324:55 (2009).

[0086] Briefly, the sample is passed through a 0.22 micron filter and the filtrate is then treated with RNase A and DNase 1 at 37° C. for one hour (if the preparation consists of purified HRV this step can be eliminated). The RNA is then extracted by phenol chloroform extraction using methods well-established in the field. Samples are treated with Trizol-LS (Invitrogen, Carlsbad, Calif.) for 5 minutes at room temperature and then chloroform, and the aqueous phase is transferred to a new tube to which isopropanol is added and incubated for 10 minutes at 25° C. and centrifuged for 5 minutes at 4° C. The supernatant is discarded and the pellet is treated with 70% ethanol at 4° C. and centrifuged for 5 minutes at 4° C. The RNA-rich supernatant is removed and the pellet is air dried for 3-5 minutes and resuspended in RNase free water. This can be stored at ˜80° C. or the next step undertaken.

[0087] From the RNA sample ˜800 ng is subjected to reverse transcription to produce DNA by the use of SS11 Reverse Transcriptase (Invitrogen) and multiple primers that incorporate random nucleotide sequences. One example is the primer 5′ GCC GGA GCT CAG ATA TCN NNN NN 3′ (SEQ ID NO: 86) where N is either AGC or T. Ideally, then, the reaction contains 1296 primers (6⁴) since this represents all possible combinations. Other primers could consist of ˜20-mers of all possible combinations. Also, the number of primers can be less than the theoretical maximal number of combinations. The second strand of DNA can be synthesized using Klenow exo-polymerase (New England Biolabs, Ipswich, Mass.) and the same set of primers to produce double-stranded DNA. However, the RNA:DNA complex formed from the reverse transcriptase can be used directly for the next step without the Klenow fill-in. To capture the 5′ end, the Klenow reaction can be supplemented with 10-30 nM of the primers: 5′ GCC GGA GCT CTG CAG ATA TC TTA AAA CTG G 3′ (SEQ ID NO: 83) or 5′ GCC GGA GCT CTG CAG ATA TC TTA AAA CAG C 3′ (SEQ ID NO: 84) where the final 10 bp universally match the 5′ ends of HRVs. The double-stranded DNA or the RNA:DNA complex is then subjected to a polymerase chain reaction using high-fidelity Taq Gold DNA polymerase (Applied Biosystems, Foster City, Calif.) using a primer such as 5′ GCC GGA GCT CTG CAG ATA TC 3′ (SEQ ID NO: 85). PCR amplicons are A-tailed with dATP and 5 units of low fidelity DNA polymerase (Invitrogen) at 72° C. for 30 minutes. A-tailed PCR amplicons are fractionated on a 1% agarose gel and fragments between 500 and 1000 nt are extracted. Amplicons are ligated en masse into the Topo TA cloning vector (Invitrogen) and transformed into competent one-shot Topo top 10 bacteria (Invitrogen). Cells are plated on LB/Amp/XGal agar, and individual colonies are picked, grown, and DNA prepared. The inserted fragments of HRV DNA are sequenced bidirectionally using the M13 primers which are incorporated in the Topo TA vector. One hundred and ninety-two clones or more, if needed, are then sequenced on an Applied Biosystems 3730×1 sequencing system with BigDye Terminator chemistry (Applied Biosystems). Sequence reads are downloaded, trimmed to remove primer sequence as well as low quality sequence, and can be assembled with the program ELVIRA (http://sourceforge.net/projects/elvira; see, e.g., Palmenberg et al., Science 324:55 (2009), or other widely available similar programs. To close gaps between assembled contigs, specific primers can be designed from the existing sequence and the polymerase chain reaction performed. The described procedure results in about four-fold redundancy in the sequence coverage of the entire HRV genome.

[0088] To ascertain the specific serotype (or strain) of the HRV isolated from a patient sample, the completed full genome sequence is compared to the 80 full-length novel genome sequences described herein, and optionally the additional 26 that are known from the literature. Although less than full-length sequences can be used for serotype identification, use of shorter sequences (i.e., less than the full genome) will likely result in a higher number of incomplete serotype identifications, because we have ascertained, from patient samples, that HRV recombines in vivo. The software used for comparing HRV sequences from a sample must be able to accommodate all the reference HRVs and the patient samples, and to identify the match using stringent criteria. There are multiple programs that accomplish this, including MUSCLE (http://www.ebi.ac.uk/Tools/muscle/index.html; Edgar, BMC Bioinformatics 5:113 (2004)), MacVector (Accelrys, San Diego, Calif.), and ClustalW (http://www.ebi.ac.uk/Tools/clustalw2/; Thompson et al., Nucleic Acids Res. 22:4673 (1994)).

[0089] While the foregoing specification teaches the principles of the present invention, with examples provided for the purpose of illustration, it will be appreciated by one skilled in the art from reading this disclosure that various changes in form and detail can be made without departing from the true scope of the invention.

[0090] All materials referred to herein, including books, manuals, journal publications, posters, abstracts, talks, patents, GenBank records and submissions, and published patent applications, are incorporated herein in their entireties.

TABLE 1
Guide to Sequences and Strains

| msf | | | | name in | | | |
|---|---|---|---|---|---|---|---|
| file | | sero- | | alignment and | name on | accession # | |
| order (1) | species (2) | type (3) | strain (4) | SEQ ID NO. (5) | tree (6) | or seq origin (7) | receptor (8) |
| — | — | — | — | hrv-ann(18) | — | — | — |
| 1 | HEV-C | a13 | Flores | af499637-cva13 | cva-13* | AF499637 | ICAM1 |
| 2 | HEV-C | a21 | Kuykendall | af546702-cva21 | cva-21* | AF546702 | ICAM1 |
| 3 | HEV-C | pv1 | Mahoney | v01149-pv1m | pv-1m* | V01149 | PVR |
| 4 | HRV-A | 1 | b, B632 | d00239-01 | not inc | D00239 | LDLR |
| 5 | HRV-A | 1 | a, 20601- | pico-01 | not inc | Pico-DB | LDLR |
| | | | Ohio | | | | |
| 6** | HRV-A | 1 | A | hrv-01 | hrv-01 | FJ445111 | LDLR |
| | | | | SEQ ID NO: 1 | | | |
| 7 | HRV-A | 2 | HGP | x02316-02 | hrv-02* | X02316 | LDLR |
| 8** | HRV-A | 7 | ATCC | hrv-07 | hrv-07 | FJ445176 | ICAM1 |
| | | | | SEQ ID NO: 3 | | | |
| 9 | HRV-A | 7 | 68-CV11 | dq473503-07 | not inc | DQ473503 | ICAM1 |
| 10** | HRV-A | 8 | ATCC | hrv-08 | hrv-08 | FJ445113 | ICAM1 |
| | | | | SEQ ID NO: 4 | | | |
| 11 | HRV-A | 9 | 211-CV13 | pico-09 | not inc | Pico-DB | ICAM1 |
| 12** | HRV-A | 9 | ATCC | hrv-09 | hrv-09 | FJ445177 | ICAM1 |
| | | | | SEQ ID NO: 7 | | | |
| 13** | HRV-A | 9 | fs ship#2, | hrv-09-f01 | hrv-09-f01 | FJ445114 | ICAM1 |
| | | | isolate#A | SEQ ID NO: 5 | | | |
| 14** | HRV-A | 9 | fs ship#2, | hrv-09-f02 | hrv-09-f02 | FJ445115 | ICAM1 |
| | | | isolate#B | SEQ ID NO: 6 | | | |
| 15 | HRV-A | 10 | 204-CV14 | dq473498-10 | not inc | DQ473498 | ICAM1 |
| 16** | HRV-A | 10 | ATCC | hrv-10 | hrv-10 | FJ445178 | ICAM1 |
| | | | | SEQ ID NO: 8 | | | |
| 17 | HRV-A | 11 | 1-CV15 | ef173414-11 | hrv-11* | EF173414 | ICAM1 |
| 18 | HRV-A | 12 | 181-CV16 | ef173415-12 | hrv-12* | EF173415 | ICAM1 |
| 19** | HRV-A | 13 | ATCC | hrv-13 | hrv-13 | FJ445116 | ICAM1 |
| | | | | SEQ ID NO: 10 | | | |
| 20** | HRV-A | 13 | fs ship#1 | hrv-13-f03 | hrv-13-f03 | FJ445117 | ICAM1 |
| | | | | SEQ ID NO: 9 | | | |
| 21 | HRV-A | 15 | 1734-South | dq473493-15 | hrv-15* | DQ473493 | ICAM1 |
| | | | Carolina/60 | | | | |
| 22 | HRV-A | 16 | 11757- | l24917-16 | hry-16* | L24917 | ICAM1 |
| | | | Washington | | | | |
| | | | DC/60 | | | | |
| 23** | HRV-A | 18 | ATCC | hrv-18 | hrv-18 | FJ445118 | ICAM1 |
| | | | | SEQ ID NO: 11 | | | |
| 24** | HRV-A | 19 | ATCC | hrv-19 | hrv-19 | FJ445119 | ICAM1 |
| | | | | SEQ ID NO: 12 | | | |
| 25** | HRV-A | 20 | ATCC | hrv-20 | hrv-20 | FJ445120 | ICAM1 |
| | | | | SEQ ID NO: 13 | | | |
| 26** | HRV-A | 21 | ATCC | hrv-21 | hrv-21 | FJ445121 | ICAM1 |
| | | | | SEQ ID NO: 14 | | | |
| 27** | HRV-A | 22 | ATCC | hrv-22 | hrv-22 | FJ445122 | ICAM1 |
| | | | | SEQ ID NO: 15 | | | |
| 28 | HRV-A | 23 | 5124-CV24 | dq473497-23 | hrv-23* | DQ473497 | ICAM1 |
| 29** | HRV-A | 24 | ATCC | hrv-24 | hrv-24 | FJ445190 | ICAM1 |
| | | | | SEQ ID NO: 16 | | | |
| 30 | HRV-A | 24 | 5146-CV25 | ef173416-24 | not inc | EF173416 | ICAM1 |
| 31** | HRV-A | 25 | ATCC | hrv-25 | hrv-25 | FJ445123 | ICAM1 |
| | | | | SEQ ID NO: 17 | | | |
| 32 | HRV-A | 28 | 6101-CV29 | dq473508-28 | hrv-28* | DQ473508 | ICAM1 |
| 33** | HRV-A | 29 | ATCC | hrv-29 | hrv-29 | FJ445125 | LDLR |
| | | | | SEQ ID NO: 20 | | | |
| 34 | HRV-A | 30 | 106F | dq473512-30 | not inc | DQ473512 | LDLR |
| 35** | HRV-A | 30 | ATCC | hrv-30 | hrv-30 | FJ445179 | LDLR |
| | | | | SEQ ID NO: 21 | | | |
| 36** | HRV-A | 31 | ATCC | hrv-31 | hrv-31 | FJ445126 | LDLR |
| | | | | SEQ ID NO: 22 | | | |
| 37** | HRV-A | 32 | ATCC | hrv-32 | hrv-32 | FJ445127 | ICAM1 |
| | | | | SEQ ID NO: 23 | | | |
| 38** | HRV-A | 33 | ATCC | hrv-33 | hrv-33 | FJ445128 | ICAM1 |
| | | | | SEQ ID NO: 24 | | | |
| 39** | HRV-A | 34 | ATCC | hrv-34 | hrv-34 | FJ445189 | ICAM1 |
| | | | | SEQ ID NO: 25 | | | |
| 40 | HRV-A | 34 | 137-3 | dq473501-34 | not inc | DQ473501 | ICAM1 |
| 41 | HRV-A | 36 | 342H | dq473505-36 | hrv-36* | DQ473505 | ICAM1 |
| 42** | HRV-A | 38 | ATCC | hrv-38 | hrv-38 | FJ445180 | ICAM1 |
| | | | | SEQ ID NO: 27 | | | |
| 43 | HRV-A | 38 | CH79 | dq473495-38 | not inc | DQ473495 | ICAM1 |
| 44 | HRV-A | 39 | 209- | ay751783-39 | hrv-39* | AY751783 | ICAM1 |
| | | | Maryland/62 | | | | |
| 45** | HRV-A | 40 | ATCC | hrv-40 | hrv-40 | FJ445129 | ICAM1 |
| | | | | SEQ ID NO: 28 | | | |
| 46 | HRV-A | 41 | 56110-North | dq473491-41 | hrv-41* | DQ473491 | ICAM1 |
| | | | Carolina/61 | | | | |
| 47** | HRV-A | 43 | ATCC | hrv-43 | hrv-43 | FJ445131 | ICAM1 |
| | | | | SEQ ID NO: 30 | | | |
| 48 | HRV-A | 44 | 71560-North | dq473499-44 | hrv-44* | DQ473499 | LDLR |
| | | | Carolina/61 | | | | |
| 49** | HRV-A | 45 | ATCC | hrv-45 | hrv-45 | FJ445132 | ICAM1 |
| | | | | SEQ ID NO: 31 | | | |
| 50 | HRV-A | 46 | Crell-Baylor | dq473506-46 | hrv-46* | DQ473506 | ICAM1 |
| | | | 2-Texas/64 | | | | |
| 51** | HRV-A | 47 | ATCC | hrv-47 | hrv-47 | FJ445133 | LDLR |
| | | | | SEQ ID NO: 32 | | | |
| 52 | HRV-A | 49 | 8213 | dq473496-49 | hrv-49* | DQ473496 | LDLR |
| 53** | HRV-A | 49 | fs ship#2 | hrv-49-f04 | hrv-49-f04 | FJ445134 | LDLR |
| | | | | SEQ ID NO: 33 | | | |
| 54** | HRV-A | 50 | ATCC | hrv-50 | hrv-50 | FJ445135 | ICAM1 |
| | | | | SEQ ID NO: 34 | | | |
| 55** | HRV-A | 51 | ATCC | hrv-51 | hrv-51 | FJ445136 | ICAM1 |
| | | | | SEQ ID NO: 35 | | | |
| 56 | HRV-A | 53 | F01-3928 | dq473507-53 | hrv-53* | DQ473507 | ICAM1 |
| 57** | HRV-A | 54 | ATCC | hrv-54 | hrv-54 | FJ445138 | ICAM1 |
| | | | | SEQ ID NO: 39 | | | |
| 58** | HRV-A | 54 | fs ship#1 | hry-54-f05 | hrv-54-f05 | FJ445139 | ICAM1 |
| | | | | SEQ ID NO: 38 | | | |
| 59 | HRV-A | 55 | Wis315E- | dq473511-55 | hrv-55* | DQ473511 | ICAM1 |
| | | | Wisconsin-64 | | | | |
| 60** | HRV-A | 56 | ATCC | hrv-56 | hrv-56 | FJ445140 | ICAM1 |
| | | | | SEQ ID NO: 40 | | | |
| 61** | HRV-A | 57 | fs ship#1 | hrv-57 | hrv-57 | FJ445141 | ICAM1 |
| | | | | SEQ ID NO: 41 | | | |
| 62** | HRV-A | 58 | ATCC | hrv-58 | hrv-58 | FJ445142 | ICAM1 |
| | | | | SEQ ID NO: 42 | | | |
| 63 | HRV-A | 59 | 611-CV35 | dq473500-59 | hrv-59* | DQ473500 | ICAM1 |
| 64** | HRV-A | 60 | ATCC | hrv-60 | hrv-60 | FJ445143 | LDLR |
| | | | | SEQ ID NO: 43 | | | |
| 65** | HRV-A | 61 | ATCC | hrv-61 | hrv-61 | FJ445144 | ICAM1 |
| | | | | SEQ ID NO: 44 | | | |
| 66** | HRV-A | 62 | ATCC | hrv-62 | hrv-62 | FJ445145 | LDLR |
| | | | | SEQ ID NO: 45 | | | |
| 67** | HRV-A | 63 | ATCC | hrv-63 | hrv-63 | FJ445146 | ICAM1 |
| | | | | SEQ ID NO: 46 | | | |
| 68** | HRV-A | 64 | ATCC | hrv-64 | hrv-64 | FJ445181 | ICAM1 |
| | | | | SEQ ID NO: 47 | | | |
| 69 | HRV-A | 64 | 6258-CV44 | ef173417-64 | not inc | EF173417 | ICAM1 |
| 70** | HRV-A | 65 | ATCC | hrv-65 | hrv-65 | FJ445147 | ICAM1 |
| | | | | SEQ ID NO: 48 | | | |
| 71** | HRV-A | 66 | ATCC | hrv-66 | hrv-66 | FJ445148 | ICAM1 |
| | | | | SEQ ID NO: 49 | | | |
| 72** | HRV-A | 67 | ATCC | hrv-67 | hrv-67 | FJ445149 | ICAM1 |
| | | | | SEQ ID NO: 50 | | | |
| 73** | HRV-A | 68 | ATCC | hrv-68 | hrv-68 | FJ445150 | ICAM1 |
| | | | | SEQ ID NO: 51 | | | |
| 74** | HRV-A | 71 | ATCC | hrv-71 | hrv-71 | FJ445152 | ICAM1 |
| | | | | SEQ ID NO: 53 | | | |
| 75 | HRV-A | 73 | 107E | dq473492-73 | hrv-73* | DQ473492 | ICAM1 |
| 76 | HRV-A | 74 | 328A | dq473494-74 | hrv-74* | DQ473494 | ICAM1 |
| 77 | HRV-A | 75 | 328F | dq473510-75 | hrv-75* | DQ473510 | ICAM1 |
| 78 | HRV-A | 76 | H00062 | dq473502-76 | not inc | DQ473502 | ICAM1 |
| 79** | HRV-A | 76 | ATCC 1x | hrv-76 | hrv-76 | FJ445182 | ICAM1 |
| | | | 3185-3310 | SEQ ID NO: 55 | | | |
| 80** | HRV-A | 77 | ATCC | hrv-77 | hrv-77 | FJ445154 | ICAM1 |
| | | | | SEQ ID NO: 56 | | | |
| 81** | HRV-A | 78 | ATCC | hrv-78 | hrv-78 | FJ445183 | ICAM1 |
| | | | | SEQ ID NO: 57 | | | |
| 82 | HRV-A | 78 | 2030-65 | ef173418-78 | not inc | EF173418 | ICAM1 |
| 83** | HRV-A | 80 | ATCC | hrv-80 | hrv-80 | FJ445156 | ICAM1 |
| | | | | SEQ ID NO: 59 | | | |
| 84** | HRV-A | 81 | ATCC | hrv-81 | hrv-81 | FJ445157 | ICAM1 |
| | | | | SEQ ID NO: 62 | | | |
| 85** | HRV-A | 81 | fs ship#1 | hrv-81-f06 | hrv-81-f06 | FJ445158 | ICAM1 |
| | | | | SEQ ID NO: 60 | | | |
| 86** | HRV-A | 81 | fs ship#2 | hrv-81-f07 | hrv-81-f07 | FJ445159 | ICAM1 |
| | | | | SEQ ID NO: 61 | | | |
| 87** | HRV-A | 82 | ATCC | hrv-82 | hrv-82 | FJ445160 | ICAM1 |
| | | | | SEQ ID NO: 63 | | | |
| 88 | HRV-A | 82 | Santa Cruz, | dq473509-82 | not inc | DQ473509 | ICAM1 |
| | | | CA | | | | |
| 89** | HRV-A | 85 | ATCC | hrv-85 | hrv-85 | FJ445163 | ICAM1 |
| | | | | SEQ ID NO: 66 | | | |
| 90 | HRV-A | 85 | 50-525-CV54 | pico-85 | not inc | Pico-DB | ICAM1 |
| 91 | HRV-A | 88 | CVD 01- | dq473504-88 | hrv-88* | DQ473504 | ICAM1 |
| | | | 0165-Dam- | | | | |
| | | | brauskas | | | | |
| 92 | HRV-A | 89 | na | a10937-89 | not inc | A10937 | ICAM1 |
| 93** | HRV-A | 89 | ATCC | hrv-89 | hrv-89 | FJ445184 | ICAM1 |
| | | | | SEQ ID NO: 70 | | | |
| 94** | HRV-A | 89 | fs ship#2 | hrv-89-f08 | hrv-89-f08 | FJ445166 | ICAM1 |
| | | | isolate#A | SEQ ID NO: 68 | | | |
| 95** | HRV-A | 89 | fs ship#2 | hrv-89-f09 | hrv-89-f09 | FJ445165 | ICAM1 |
| | | | isolate#B | SEQ ID NO: 69 | | | |
| 96 | HRV-A | 89 | 41467-Gallo | m16248-89 | not inc | M16248 | ICAM1 |
| 97** | HRV-A | 90 | ATCC | hrv-90 | hrv-90 | FJ445167 | ICAM1 |
| | | | | SEQ ID NO: 71 | | | |
| 98** | HRV-A | 94 | ATCC | hrv-94 | hrv-94 | FJ445185 | ICAM1 |
| | | | | SEQ ID NO: 74 | | | |
| 99 | HRV-A | 94 | SF-1803 | ef173419-94 | not inc | EF173419 | ICAM1 |
| 100** | HRV-A | 95 | ATCC | hrv-95 | hrv-95 | FJ445170 | ICAM1 |
| | | | | SEQ ID NO: 75 | | | |
| 101** | HRV-A | 96 | ATCC | hrv-96 | hrv-96 | FJ445171 | ICAM1 |
| | | | | SEQ ID NO: 76 | | | |
| 102** | HRV-A | 98 | ATCC | hrv-98 | hrv-98 | FJ445173 | ICAM1 |
| | | | | SEQ ID NO: 78 | | | |
| 103** | HRV-A | 100 | ATCC | hrv-100 | hrv-100 | FJ445175 | ICAM1 |
| | | | | SEQ ID NO: 80 | | | |
| 104 | HRV-C | na | QPM | ef186077-qpm | qpm* | EF186077 | ICAM1 |
| 105 | HRV-C | na | Nat001 | ef077279-nat001 | nat001* | EF077279(16) | ICAM1 |
| 106 | HRV-C | na | ny1078 | ny1078 | ny1078 | unpub(17) | ICAM1 |
| 107 | HRV-C | na | c024 | ef582385-c024 | c024* | EF582385 | ICAM1 |
| 108 | HRV-C | na | Nat045 | ef077280-nat045 | nat045* | EF077280 | ICAM1 |
| 109 | HRV-C | na | c026 | ef582387-c026 | c026* | EF582387 | ICAM1 |
| 110 | HRV-C | na | c025 | ef582386-c025 | c025* | EF582386 | ICAM1 |
| 111 | HRV-B | 3 | FEB | dq473485-03 | hrv-03* | DQ473485 | ICAM1 |
| 112 | HRV-B | 3 | FEB | ef173422-03 | not inc | EF173422 | ICAM1 |
| 113 | HRV-B | 4 | 16/60 | dq473490-04 | hrv-04* | DQ473490 | ICAM1 |
| 114** | HRV-B | 5 | ATCC | hrv-05 | hrv-05 | FJ445112 | ICAM1 |
| | | | | SEQ ID NO: 2 | | | |
| 115 | HRV-B | 6 | Thompson | dq473486-06 | hrv-06* | DQ473486 | ICAM1 |
| 116 | HRV-B | 14 | 1059-South | l05355-14 | hrv-14* | L05355 | ICAM1 |
| | | | Carolina/59 | | | | |
| 117 | HRV-B | 14 | 1060-South | k02121-14 | not inc | K02121 | ICAM1 |
| | | | Carolina/59 | | | | |
| 118 | HRV-B | 17 | 33342-North | ef173420-17 | hrv-17* | EF173420 | ICAM1 |
| | | | Carolina/59 | | | | |
| 119** | HRV-B | 26 | ATCC | hrv-26 | hrv-26 | FJ445124 | ICAM1 |
| | | | | SEQ ID NO: 18 | | | |
| 120** | HRV-B | 27 | ATCC | hrv-27 | hrv-27 | FJ445186 | ICAM1 |
| | | | | SEQ ID NO: 19 | | | |
| 121 | HRV-B | 27 | 5870-CV28 | ef173421-27 | not inc | EF173421 | ICAM1 |
| 122 | HRV-B | 35 | 164A | dq473487-35 | not inc | DQ473487 | ICAM1 |
| 123** | HRV-B | 35 | ATCC | hrv-35 | hrv-35 | FJ445187 | ICAM1 |
| | | | | SEQ ID NO: 26 | | | |
| 124 | HRV-B | 37 | 151-1 | ef173423-37 | hrv-37* | EF173423 | ICAM1 |
| 125** | HRV-B | 42 | ATCC | hrv-42 | hrv-42 | FJ445130 | ICAM1 |
| | | | | SEQ ID NO: 29 | | | |
| 126 | HRV-B | 48 | 1505 | dq473488-48 | hrv-48* | DQ473488 | ICAM1 |
| 127** | HRV-B | 52 | ATCC | hrv-52 | hrv-52 | FJ445188 | ICAM1 |
| | | | | SEQ ID NO: 37 | | | |
| 128** | HRV-B | 52 | fs ship#1 | hrv-52-f10 | hrv-52-f10 | FJ445137 | ICAM1 |
| | | | | SEQ ID NO: 36 | | | |
| 129 | HRV-B | 52 | F01-3772 | ef173424-52 | not inc | EF173424 | ICAM1 |
| 130** | HRV-B | 69 | ATCC | hrv-69 | hrv-69 | FJ445151 | ICAM1 |
| | | | | SEQ ID NO: 52 | | | |
| 131 | HRV-B | 70 | F02-2547- | dq473489-70 | hrv-70* | DQ473489 | ICAM1 |
| | | | Treganza | | | | |
| 132** | HRV-B | 72 | ATCC | hrv-72 | hrv-72 | FJ445153 | ICAM1 |
| | | | | SEQ ID NO: 54 | | | |
| 133** | HRV-B | 79 | ATCC | hrv-79 | hrv-79 | FJ445155 | ICAM1 |
| | | | | SEQ ID NO: 58 | | | |
| 134** | HRV-B | 83 | ATCC | hrv-83 | hrv-83 | FJ445161 | ICAM1 |
| | | | | SEQ ID NO: 64 | | | |
| 135** | HRV-B | 84 | ATCC | hrv-84 | hrv-84 | FJ445162 | ICAM1 |
| | | | | SEQ ID NO: 65 | | | |
| 136** | HRV-B | 86 | ATCC | hrv-86 | hrv-86 | FJ445164 | ICAM1 |
| | | | | SEQ ID NO: 67 | | | |
| 137** | HRV-B | 91 | ATCC | hrv-91 | hrv-91 | FJ445168 | ICAM1 |
| | | | | SEQ ID NO: 72 | | | |
| 138** | HRV-B | 92 | ATCC | hrv-92 | hrv-92 | FJ445169 | ICAM1 |
| | | | | SEQ ID NO: 73 | | | |
| 139 | HRV-B | 93 | SF-1492 | ef173425-93 | hrv-93* | EF173425 | ICAM1 |
| 140** | HRV-B | 97 | ATCC | hrv-97 | hrv-97 | FJ445172 | ICAM1 |
| | | | | SEQ ID NO: 77 | | | |
| 141** | HRV-B | 99 | ATCC | hrv-99 | hrv-99 | FJ445174 | ICAM1 |
| | | | | SEQ ID NO: 79 | | | |

| msf | | | | | | | | published |
|---|---|---|---|---|---|---|---|---|
| file | drug | ORF | ORF | protein | seq | | seq | sequence |
| order (1) | group (9) | start (10) | end (11) | length (12) | length (13) | 3′NTR (14) | desc (15) | reference |
| — | — | — | — | — | — | — | — | (17-21) |
| 1 | 1 | 746 | 7387 | 2214 | 7458 | 71 | cg | (22) |
| 2 | 1 | 714 | 7334 | 2207 | 7406 | 72 | cg | (22) |
| 3 | 1 | 743 | 7369 | 2209 | 7440 | 71 | cg | (23) |
| 4 | 2 | 623 | 7093 | 2157 | 7133 | 40 | cg | (24) |
| 5 | 2 | 627 | 7097 | 2157 | 7137 | 40 | cg | Pico-DB(7) |
| 6** | 2 | 627 | 7097 | 2157 | 7137 | 40 | cg | This study |
| 7 | 2 | 611 | 7060 | 2150 | 7102 | 42 | cg | (25) |
| 8** | 2 | 619 | 7104 | 2162 | 7146 | 42 | cg | This study |
| 9 | 2 | 619 | 7104 | 2162 | 7146 | 42 | cg | (26) |
| 10** | 2 | 607 | 7068 | 2154 | 7108 | 40 | cg | This study |
| 11 | 2 | 611 | 7081 | 2157 | 7128 | 47 | cg | Pico-DB(7) |
| 12** | 2 | 612 | 7085 | 2158 | 7132 | 47 | cg | This study |
| 13** | 2 | 614 | 7087 | 2158 | 7134 | 47 | cg | This study |
| 14** | 2 | 613 | 7086 | 2158 | 7133 | 47 | cg | This study |
| 15 | 2 | 609 | 7088 | 2160 | 7137 | 49 | cg | (26) |
| 16** | 2 | 609 | 7088 | 2160 | 7137 | 49 | cg | This study |
| 17 | 2 | 619 | 7077 | 2153 | 7125 | 48 | cg | (27) |
| 18 | 2 | 614 | 7078 | 2155 | 7124 | 46 | cg | (27) |
| 19** | 1 | 616 | 7095 | 2160 | 7140 | 45 | cg | This study |
| 20** | 1 | 617 | 7096 | 2160 | 7143 | 47 | cg | This study |
| 21 | 2 | 616 | 7092 | 2159 | 7134 | 42 | cg | (26) |
| 22 | 2 | 626 | 7084 | 2153 | 7124 | 40 | cg | (28) |
| 23** | 2 | 612 | 7070 | 2153 | 7119 | 49 | cg | This study |
| 24** | 2 | 615 | 7088 | 2158 | 7135 | 47 | cg | This study |
| 25** | 2 | 622 | 7119 | 2166 | 7163 | 44 | cg | This study |
| 26** | 2 | 615 | 7085 | 2157 | 7134 | 49 | cg | This study |
| 27** | 2 | 615 | 7082 | 2156 | 7129 | 47 | cg | This study |
| 28 | 2 | 535 | 6981 | 2149 | 7025 | 44 | cg-5 | (26) |
| 29** | 2 | 622 | 7083 | 2154 | 7132 | 49 | cg | This study |
| 30 | 2 | 622 | 7083 | 2154 | 7132 | 49 | cg | (27) |
| 31** | 2 | 613 | 7077 | 2155 | 7126 | 49 | cg | This study |
| 32 | 2 | 622 | 7104 | 2161 | 7148 | 44 | cg | (26) |
| 33** | 2 | 613 | 7074 | 2154 | 7123 | 49 | cg | This study |
| 34 | 2 | 609 | 7055 | 2149 | 7099 | 44 | cg | (26) |
| 35** | 2 | 609 | 7055 | 2149 | 7099 | 44 | cg | This study |
| 36** | 2 | 612 | 7082 | 2157 | 7131 | 49 | cg | This study |
| 37** | 1 | 611 | 7084 | 2158 | 7133 | 49 | cg | This study |
| 38** | 2 | 620 | 7084 | 2155 | 7133 | 49 | cg | This study |
| 39** | 2 | 612 | 7070 | 2153 | 7119 | 49 | cg | This study |
| 40 | 2 | 612 | 7070 | 2153 | 7119 | 49 | cg | (26) |
| 41 | 2 | 617 | 7099 | 2161 | 7141 | 42 | cg | (26) |
| 42** | 2 | 611 | 7087 | 2159 | 7136 | 49 | cg | This study |
| 43 | 2 | 611 | 7087 | 2159 | 7136 | 49 | cg | (26) |
| 44 | 2 | 615 | 7085 | 2157 | 7136 | 51 | cg | (29) |
| 45** | 2 | 613 | 7089 | 2159 | 7138 | 49 | cg | This study |
| 46 | 2 | 616 | 7098 | 2161 | 7145 | 47 | cg | (26) |
| 47** | 1 | 614 | 7087 | 2158 | 7129 | 42 | cg | This study |
| 48 | 2 | 613 | 7074 | 2154 | 7123 | 49 | cg | (26) |
| 49** | 2 | 616 | 7071 | 2152 | 7114 | 43 | cg | This study |
| 50 | 2 | 613 | 7104 | 2164 | 7149 | 45 | cg | (26) |
| 51** | 2 | 613 | 7083 | 2157 | 7132 | 49 | cg | This study |
| 52 | 2 | 613 | 7062 | 2150 | 7106 | 44 | cg | (26) |
| 53** | 2 | 616 | 7065 | 2150 | 7109 | 44 | cg | This study |
| 54** | 2 | 611 | 7069 | 2153 | 7118 | 49 | cg | This study |
| 55** | 2 | 614 | 7108 | 2165 | 7152 | 44 | cg | This study |
| 56 | 2 | 613 | 7098 | 2162 | 7143 | 45 | cg | (26) |
| 57** | 1 | 612 | 7085 | 2158 | 7134 | 49 | cg | This study |
| 58** | 1 | 611 | 7084 | 2158 | 7133 | 49 | cg | This study |
| 59 | 2 | 523 | 6987 | 2155 | 7036 | 49 | cg-5 | (26) |
| 60** | 2 | 614 | 7087 | 2158 | 7136 | 49 | cg | This study |
| 61** | 2 | 615 | 7085 | 2157 | 7134 | 49 | cg | This study |
| 62** | 2 | 619 | 7098 | 2160 | 7140 | 42 | cg | This study |
| 63 | 2 | 612 | 7085 | 2158 | 7135 | 50 | cg | (26) |
| 64** | 2 | 614 | 7090 | 2159 | 7139 | 49 | cg | This study |
| 65** | 2 | 619 | 7098 | 2160 | 7139 | 41 | cg | This study |
| 66** | 2 | 615 | 7082 | 2156 | 7131 | 49 | cg | This study |
| 67** | 2 | 619 | 7092 | 2158 | 7141 | 49 | cg | This study |
| 68** | 2 | 615 | 7082 | 2156 | 7129 | 47 | cg | This study |
| 69 | 2 | 615 | 7082 | 2156 | 7129 | 47 | cg | (27) |
| 70** | 2 | 624 | 7118 | 2165 | 7162 | 44 | cg | This study |
| 71** | 2 | 617 | 7090 | 2158 | 7139 | 49 | cg | This study |
| 72** | 2 | 612 | 7085 | 2158 | 7135 | 50 | cg | This study |
| 73** | 2 | 623 | 7120 | 2166 | 7164 | 44 | cg | This study |
| 74** | 2 | 626 | 7117 | 2164 | 7161 | 44 | cg | This study |
| 75 | 2 | 616 | 7095 | 2160 | 7140 | 45 | cg | (26) |
| 76 | 2 | 611 | 7078 | 2156 | 7120 | 42 | cg | (26) |
| 77 | 2 | 618 | 7091 | 2158 | 7137 | 46 | cg | (26) |
| 78 | 2 | 620 | 7084 | 2155 | 7129 | 45 | cg | (26) |
| 79** | 2 | 619 | 7083 | 2155 | 7128 | 45 | cg | This study |
| 80** | 2 | 614 | 7087 | 2158 | 7136 | 49 | cg | This study |
| 81** | 2 | 623 | 7099 | 2159 | 7145 | 46 | cg | This study |
| 82 | 2 | 623 | 7099 | 2159 | 7145 | 46 | cg | (27) |
| 83** | 2 | 616 | 7095 | 2160 | 7138 | 43 | cg | This study |
| 84** | 1 | 618 | 7076 | 2153 | 7116 | 40 | cg | This study |
| 85** | 1 | 618 | 7076 | 2153 | 7116 | 40 | cg | This study |
| 86** | 1 | 618 | 7076 | 2153 | 7116 | 40 | cg | This study |
| 87** | 2 | 615 | 7079 | 2155 | 7123 | 44 | cg | This study |
| 88 | 2 | 621 | 7085 | 2155 | 7129 | 44 | cg | (26) |
| 89** | 2 | 615 | 7091 | 2159 | 7140 | 49 | cg | This study |
| 90 | 2 | 615 | 7091 | 2159 | 7140 | 49 | cg | Pico-DB(7) |
| 91 | 2 | 622 | 7101 | 2160 | 7143 | 42 | cg | (26) |
| 92 | 2 | 619 | 7110 | 2164 | 7152 | 42 | cg | US patent |
| | | | | | | | | DE3628658- |
| | | | | | | | | A1 Mar. 03, |
| | | | | | | | | 1988 |
| 93** | 2 | 619 | 7110 | 2164 | 7152 | 42 | cg | This study |
| 94** | 2 | 617 | 7108 | 2164 | 7150 | 42 | cg | This study |
| 95** | 2 | 619 | 7110 | 2164 | 7152 | 42 | cg | This study |
| 96 | 2 | 619 | 7110 | 2164 | 7152 | 42 | cg | (30) |
| 97** | 2 | 617 | 7075 | 2153 | 7124 | 49 | cg | This study |
| 98** | 2 | 616 | 7083 | 2156 | 7132 | 49 | cg | This study |
| 99 | 2 | 616 | 7083 | 2156 | 7132 | 49 | cg | (27) |
| 100** | 2 | 609 | 7070 | 2154 | 7110 | 40 | cg | This study |
| 101** | 2 | 618 | 7088 | 2157 | 7134 | 46 | cg | This study |
| 102** | 2 | 611 | 7084 | 2158 | 7133 | 49 | cg | This study |
| 103** | 2 | 612 | 7091 | 2160 | 7140 | 49 | cg | This study |
| 104 | na | 438 | 6866 | 2143 | 6917 | 51 | cg-5 | (31) |
| 105 | na | 614 | 7039 | 2142 | 7079 | 40 | cg | (26) and this |
| | | | | | | | | study |
| 106 | na | 609 | 7025 | 2139 | 7072 | 47 | cg | (32, 33) |
| 107 | na | 616 | 7047 | 2144 | 7099 | 52 | cg | (34) |
| 108 | na | 542 | 6973 | 2144 | 7015 | 42 | cg-5 | (26) |
| 109 | na | 612 | 7037 | 2142 | 7086 | 49 | cg | (34) |
| 110 | na | 617 | 7072 | 2152 | 7114 | 42 | cg | (34) |
| 111 | 1 | 627 | 7160 | 2178 | 7208 | 48 | cg | (26) |
| 112 | 1 | 627 | 7160 | 2178 | 7211 | 51 | cg | (27) |
| 113 | 1 | 626 | 7156 | 2177 | 7212 | 56 | cg | (26) |
| 114** | 1 | 632 | 7162 | 2177 | 7212 | 50 | cg | This study |
| 115 | 1 | 628 | 7164 | 2179 | 7216 | 52 | cg | (26) |
| 116 | 1 | 629 | 7165 | 2179 | 7212 | 47 | cg | (35) |
| 117 | 1 | 629 | 7165 | 2179 | 7212 | 47 | cg | (36) |
| 118 | 1 | 619 | 7176 | 2186 | 7219 | 43 | cg | (27) |
| 119** | 1 | 633 | 7160 | 2176 | 7211 | 51 | cg | This study |
| 120** | 1 | 628 | 7161 | 2178 | 7217 | 56 | cg | This study |
| 121 | 1 | 628 | 7161 | 2178 | 7217 | 56 | cg | (27) |
| 122 | 1 | 623 | 7168 | 2182 | 7224 | 56 | cg | (26) |
| 123** | 1 | 623 | 7168 | 2182 | 7224 | 56 | cg | This study |
| 124 | 1 | 631 | 7164 | 2178 | 7216 | 52 | cg | (27) |
| 125** | 1 | 633 | 7163 | 2177 | 7223 | 60 | cg | This study |
| 126 | 1 | 623 | 7174 | 2184 | 7214 | 40 | cg | (26) |
| 127** | 1 | 625 | 7173 | 2183 | 7216 | 43 | cg | This study |
| 128** | 1 | 625 | 7173 | 2183 | 7216 | 43 | cg | This study |
| 129 | 1 | 625 | 7173 | 2183 | 7216 | 43 | cg | (27) |
| 130** | 1 | 621 | 7169 | 2183 | 7211 | 42 | cg | This study |
| 131 | 1 | 623 | 7180 | 2186 | 7223 | 43 | cg | (26) |
| 132** | 1 | 631 | 7167 | 2179 | 7216 | 49 | cg | This study |
| 133** | 1 | 625 | 7170 | 2182 | 7224 | 54 | cg | This study |
| 134** | 1 | 627 | 7175 | 2183 | 7230 | 55 | cg | This study |
| 135** | 1 | 622 | 7152 | 2177 | 7201 | 49 | cg | This study |
| 136** | 1 | 632 | 7165 | 2178 | 7213 | 48 | cg | This study |
| 137** | 1 | 621 | 7178 | 2186 | 7221 | 43 | cg | This study |
| 138** | 1 | 628 | 7176 | 2183 | 7233 | 57 | cg | This study |
| 139 | 1 | 629 | 7162 | 2178 | 7215 | 53 | cg | (27) |
| 140** | 1 | 626 | 7156 | 2177 | 7207 | 51 | cg | This study |
| 141** | 1 | 626 | 7156 | 2177 | 7208 | 52 | cg | This study |

Table 1 Legend
(1) Order in which these sequences are listed in accompanying protein alignment (Table 5).
(2) Designation of Human Rhinovirus-C (HRV-C) as a species has been accepted by the ICTV Study Group on Picornaviruses.
(3) Field strains were assigned serotypes on the basis of sequence similarity to reference (ATCC) strains.
(4) Strain designation from GenBank sequence description if available; ATCC origin; or field-strain isolate.
(5) Protein and RNA alignments use these names. Accession number, if available, precedes serotype; f01-f10: field strains; entries beginning with “hrv-” are from this study.
(6) (abbreviated) Strain names used on phylograms. Not all alignment entries are included (not inc). Asterisk (*) designates GenBank origin, sequence is not original to this study.
(7) GenBank accession number for published sequences (black) or from this study (green). “Pico-DB” is unpublished, but available at: http://www.picornaviridae.com/
(8) The Major (M) group HRV use ICAM-1 receptors. The Minor (m) group HRVs use LDL receptors. See reference: (35).
(9) Drug group reactivity according to reference: (36). na: not part of that study.
(10) 1^{st} base of polyprotein open reading frame within individual sequence file.
(11) Last base of polyprotein open reading frame within individual sequence file. Count excludes the ORF termination codon.
(12) Polyprotein length, in amino acids, encoded by this genome.
(13) Genome sequence length.
(14) 3′ non-coding fragment length. Count does not include poly(A).
(15) cg: complete genome. cg-5: almost complete genome, except for 5′ end.
(16) Chimeric sequence: bases 1-135 from this study, remainder from EF077279.
(17) Thomas Briese and Ian Lipkin, personal communication to ACP.
(18) First entry of Table 5 alignment includes an annotation line with protein structure features.
Citations from Table 1
17. T. C. Bjorndahl, H. Monzavi, D. S. Wishart, J. Biomol. NMR 26, 85 (2003).
18. E. Arnold, M. G. Rossmann, J. Mol. Biol. 211, 763 (1990).
19. D. W. Gohara et al., J. Biol. Chem. 275, 25523 (2000).
20. J. F. Petersen et al., EMBO J. 18, 5463 (1999).
21. D. M. Strauss, L. W. Glustrom, D. S. Wuttke, J. Mol. Biol. 330, 225 (2003).
22. B. Brown, M. S. Oberste, K. Maher, M. A. Pallansch, J. Virol. 77, 8973 (2003).
23. V. R. Racaniello, D. Baltimore, Proc. Natl. Acad. Sci. U.S.A. 78, 4887 (1981).
24. P. J. Hughes, C. North, C. H. Jellis, P. D. Minor, G. Stanway, J. Gen. Virol. 69 (Pt 1), 49 (1988).
25. T. Skern et al., Nucleic Acids Res. 13, 2111 (1985).
26. A. L. Kistler et al., Virol. J. 4, 40 (2007).
27. C. Tapparel et al., BMC Genomics 8, 224 (2007).
28. W. M. Lee, W. Wang, R. R. Rueckert, Virus Genes 9, 177 (1995).
29. J. R. Harris, V. R. Racaniello, J. Virol. 79, 5363 (2005).
30. M. Duechler et al., Proc. Natl. Acad. Sci. U.S.A. 84, 2605 (1987).
31. P. McErlean et al., J. Clin. Virol. 39, 67 (2007).
32. N. Renwick et al., J. Infect. Dis. 196, 1754 (2007).
33. D. Lamson et al., J. Infect. Dis. 194, 1398 (2006).
34. S. K. Lau et al., J. Clin. Microbiol. 45, 3655 (2007).
35. T. J. Smith et al., J. Virol. 67, 1148 (1993).
36. G. Stanway, P. J. Hughes, R. C. Mountford, P. D. Minor, J. W. Almond, Nucleic Acids Res. 12, 7859 (1984).

TABLE 2
Recombination events in HRV serotypes. The P-value listed is
the lowest obtained. See Table 1 for full data and P-values.

| Major | Minor | Recom- | | |
|---|---|---|---|---|
| Parent | Parent | binant | Genome Region | P-value |
| hrv-45 | hrv-21 | hrv-8 | 5′-UTR | 1.094 × 10−21 |
| hrv-45 | hrv-21 | hrv-95 | 5′UTR | 1.094 × 10−21 |
| hrv-65 | hrv-21 | hrv-80 | 5′-UTR, VP4 | 6.129 × 10−23 |
| hrv-51 | hrv-11 | hrv-20 | 5′-UTR, VP4 | 8.402 × 10−26 |
| hrv-51 | hrv-11 | hrv-68 | 5′-UTR, VP4 | 8.402 × 10−26 |
| hrv-28 | hrv-62 | hrv-71 | 5′-UTR | 8.484 × 10−15 |
| hrv-54-f05 | hrv-75 | hrv-18 | 5′-UTR, VP4, VP2, | 3.737 × 10−7 |
| | | | VP3, VP1 | |
| hrv-54-f05 | hrv-75 | hrv-24 | 5-UTR, VP4, VP2, | 3.737 × 10−7 |
| | | | VP3, VP1 | |
| hrv-54-f05 | hrv-75 | hrv-50 | 5′-UTR, VP4, VP2, | 3.737 × 10−7 |
| | | | VP3, VP1 , P2A | |
| hrv-54-f05 | hrv-75 | hrv-34 | VP4, VP2, VP3, | 3.737 × 10−7 |
| | | | VP1 | |
| hrv-54-f05 | hrv-67 | hrv-38 | VP2, VP3, VP1, | 1.561 × 10−29 |
| | | | P2A, P2B, P2C, | |
| | | | P3A | |
| hrv-54 | hrv-67 | hrv-60 | VP2, VP3, VP1, | 1.561 × 10−29 |
| | | | P2A, P2B, P2C, | |
| | | | P3A | |
| hrv-53 | hrv-80 | hrv-46 | 5′-UTR, VP4, VP2, | 1.291 × 10−62 |
| | | | VP3, VP1 | |
| hrv-13-f03 | HRV41 | hrv-73 | 5′-UTR, VP4, VP2, | 9.419 × 10−12 |
| | | | VP3, VP1 | |
| hrv-30 | hrv-59 | hrv-39 | 5′-UTR, VP4, VP2, | 2.963 × 10−12 |
| | | | VP3, VP1 | |
| hrv-68 | hrv-20 | hrv-28 | VP4, VP2, VP3, | 6.839 × 10−12 |
| | | | VP1, P2A, P2B, | |
| | | | P2C | |
| hrv-100 | hrv-10 | hrv-56 | P2A, P2B, P2C, | 4.230 × 10−17 |
| | | | P3A, P3B, P3C, | |
| | | | P3D | |
| hrv-29 | hrv-54-f05 | hrv-31 | P3C, P3D | 7.934 × 10−13 |
| hrv-29 | hrv-54-f05 | hrv-47 | P3C, P3D | 1.232 × 10−10 |
| hrv-42 | hrv-97 | hrv-4 | 5′-UTR, VP4 | 8.233 × 10−35 |

TABLE 3
Recombination analysis based on the HHM-based alignment using the complete
genomes from the reference set and the field samples. Results are shown for all
recombination events with P < 0.00001 by at least 2 analysis modes (see
Methods). P-values represent the results using the indicated analysis modes. The
nucleotide is referenced to the recombinant (daughter) hrv. See FIG. 3 for
representative recombinations in graphical forms. When a progressive alignment
was performed and recombination tested, 19 of the 23 recombinants were confirmed
(a, major and minor parents were the same as with HHM; b, one or both parents differed
from the HHM-based analysis).

| Major | Minor | | | | | |
|---|---|---|---|---|---|---|
| Parent | Parent | Recombinant | start | end | Genome Region | P-RDP |
| hrv-45 | hrv-21 | hrv-8 (a) | 13 | 631 | 5′-UTR | 3.351 × 10−20 |
| hrv-45 | hrv-21 | hrv-95 (a) | 34 | 599 | 5′UTR | 3.351 × 10−20 |
| hrv-65 | hrv-21 | hrv-80 (b) | 10 | 756 | 5′-UTR, VP4 | 1.077 × 10−21 |
| hrv-51 | hrv-11 | hrv-20 (b) | 6 | 690 | 5′-UTR, VP4 | 1.023 × 10−19 |
| hrv-51 | hrv-11 | hrv-68 (b) | 11 | 691 | 5′-UTR, VP4 | 1.023 × 10−19 |
| hrv-28 | hrv-62 | hrv-71 | 1 | 661 | 5′-UTR | 2.582 × 10−9 |
| hrv-54-f05 | hrv-75 | hrv-18 | 511 | 3058 | 5′-UTR, VP4, VP2, VP3, VP1 | 1.371 × 10−3 |
| hrv-54-f05 | hrv-75 | hrv-24 (b) | 540 | 3071 | 5-UTR, VP4, VP2, VP3, VP1 | 1.371 × 10−3 |
| hrv-54-f05 | hrv-75 | hrv-50 (b) | 554 | 3294 | 5′-UTR, VP4, VP2, VP3, VP1, | 1.371 × 10−3 |
| | | | | | P2A | |
| hrv-54-f05 | hrv-75 | hrv-34 | 651 | 3088 | VP4, VP2, VP3, VP1 | 1.371 × 10−3 |
| hrv-54-f05 | hrv-67 | hrv-38 (b) | 1006 | 4935 | VP2, VP3, VP1, P2A, P2B, | |
| | | | | | P2C, P3A | |
| hrv-54 | hrv-67 | hrv-60 (b) | 995 | 4979 | VP2, VP3, VP1, P2A, P2B, | 8.952 × 10−12 |
| | | | | | P2C, P3A | |
| hrv-53 | hrv-80 | hrv-46 (a) | 32 | 3222 | 5′-UTR, VP4, VP2, VP3, VP1 | 1.153 × 10−22 |
| hrv-13-f03 | HRV41 | hrv-73 | 64 | 3333 | 5′-UTR, VP4, VP2, VP3, VP1 | 1.606 × 10−2 |
| hrv-30 | hrv-59 | hrv-39 (b) | 450 | 3148 | 5′-UTR, VP4, VP2, VP3, VP1 | 1.958 × 10−7 |
| hrv-68 | hrv-20 | hrv-28 (a) | 691 | 4143 | VP4, VP2, VP3, VP1, P2A, | |
| | | | | | P2B, P2C | |
| hrv-100 | hrv-10 | hrv-56 (b) | 3487 | 6889 | P2A, P2B, P2C, P3A, P3B, | 4.315 × 10−3 |
| | | | | | P3C, P3D | |
| hrv-29 | hrv-54-f05 | hrv-31 (a) | 5181 | 7007 | P3C, P3D | 3.3 × 10−10 |
| hrv-29 | hrv-54-f05 | hrv-47 (a) | 5321 | 7008 | P3C, P3D | 3.3 × 10−10 |
| hrv-42 | hrv-97 | hrv-4 (a) | 1 | 640 | 5′-UTR, VP4 | 1.322 × 10−12 |
| hrv-84 | hrv-37 | hrv-27 (b) | 48 | 718 | 5′-UTR, VP4 | 7.842 × 10−4 |
| hrv-84 | hrv-37 | hrv-93 (b) | 100 | 772 | 5′-UTR, VP4 | 7.842 × 10−4 |
| hrv-84 | hrv-37 | hrv-97 (b) | 101 | 748 | 5′-UTR, VP4 | 7.842 × 10−4 |

| Major | | | | | |
|---|---|---|---|---|---|
| Parent | P-BootScan | P-MaxChi | P-Chimeara | P-Siscan | P-3Seq |
| hrv-45 | 1.094 × 10−21 | 5.518 × 10−08 | 4.7 × 10−9 | 6.061 × 10−12 | |
| hrv-45 | 1.094 × 10−21 | 5.518 × 10−08 | 4.7 × 10−9 | 6.061 × 10−12 | |
| hrv-65 | 6.129 × 10−23 | 9.417 × 10−8 | 1.584 × 10−3 | 5.099 × 10−12 | 2.235 × 10−5 |
| hrv-51 | 8.402 × 10−26 | 1.606 × 10−6 | 7.286 × 10−7 | 2.187 × 10−20 | 2.101 × 10−12 |
| hrv-51 | 8.402 × 10−26 | 1.606 × 10−6 | 7.286 × 10−7 | 2.187 × 10−20 | 2.101 × 10−12 |
| hrv-28 | 8.484 × 10−15 | 1.194 × 10−3 | 4.255 × 10−6 | | 1.899 × 10−8 |
| hrv-54-f05 | | 1.555 × 10−6 | 3.737 × 10−7 | 8.391 × 10−3 | 2.173 × 10−3 |
| hrv-54-f05 | | 1.555 × 10−6 | 3.737 × 10−7 | 8.391 × 10−3 | 2.173 × 10−3 |
| hrv-54-f05 | | 1.555 × 10−6 | 3.737 × 10−7 | 8.391 × 10−3 | 2.173 × 10−3 |
| hrv-54-f05 | | 1.555 × 10−6 | 3.737 × 10−7 | 8.391 × 10−3 | 2.173 × 10−3 |
| hrv-54-f05 | 1.561 × 10−29 | 9.616 × 10−14 | 1.322 × 10−14 | 8.465 × 10−5 | 3.552 × 1−18 |
| hrv-54 | 1.561 × 10−29 | 9.616 × 10−14 | 1.322 × 10−14 | 8.465 × 10−5 | 3.552 × 1-0−18 |
| hrv-53 | 2.641 × 10−16 | 3.295 × 10−23 | 1.261 × 10−25 | 3.511 × 10−10 | 1.291 × 10−62 |
| hrv-13-f03 | | 3.503 × 10−9 | 9.419 × 10−12 | | 2.363 × 10−8 |
| hrv-30 | 6.012 × 10−3 | 9.356 × 10−11 | 2.963 × 10−12 | 8.613 × 10−7 | 1.023 × 10−11 |
| hrv-68 | 4.245 × 10−11 | 9.232 × 10−6 | 1.932 × 10−6 | 6.839 × 10−12 | |
| hrv-100 | 4.230 × 10−17 | 1.23 × 10−7 | 1.921 × 10−10 | | 5.416 × 10−7 |
| hrv-29 | 7.934 × 10−13 | 1.038 × 10−6 | 5.174 × 10−8 | 1.232 × 10−10 | |
| hrv-29 | | 1.038 × 10−6 | 5.174 × 10−8 | 1.232 × 10−10 | |
| hrv-42 | 8.233 × 10−35 | 1.315 × 10−10 | 1.126 × 10−8 | 9.599 × 10−22 | 4.975 × 10−4 |
| hrv-84 | 1.500 × 10−10 | 9.948 × 10−4 | 1.061 × 10−3 | 2.364 × 10−10 | 1.792 × 10−4 |
| hrv-84 | 1.500 × 10−10 | 9.948 × 10−4 | 1.061 × 10−3 | 2.364 × 10−10 | 1.792 × 10−4 |
| hrv-84 | 1.500 × 10−10 | 9.948 × 10−4 | 1.061 × 10−3 | 2.364 × 10−10 | 1.792 × 10−4 |

TABLE 4
Amino acid differences between the HRV reference genomes and the analogous field isolates.
The position is the amino acid number of the reference genome for each comparison.

| | hrv-52-f10 | hrv-89-f08 | hrv-89-f09 | hrv-81-f06 | hrv-81-f07 | hrv-13-f03 | hrv-09-f01 | hrv-09-f02 | hrv-49-f04 | hrv-54-f05 |
|---|---|---|---|---|---|---|---|---|---|---|
| 40 | | | | | | | R40G | R40G | | |
| 59 | | | | | | | S59D | S59D | | |
| 136 | | | | | | K136E | | | | E136D |
| 142 | | | | N142S | N142S | | G142N | G142N | | |
| 143 | | | | | | | D143E | D143E | | |
| 156 | | | | | | | | | R156K | |
| 173 | | | | | | C173S | | | | |
| 193 | | | | | | | | | | V193I |
| 199 | | | | | | | D199H | D199H | | |
| 215 | | | | | | | | | N215K | |
| 216 | | | | | | | | | −f216Y | |
| 222 | Q222S | | | | | | | | T222A | |
| 227 | N227D | | | | | | | | | |
| 229 | I229T | | | | | I229T | | | | −229P |
| 230 | | | | | | N230G | | | | A230- |
| 232 | E232A | | T232S | | | | | | S232N | V232T |
| 233 | | | | | | | | | M233I | |
| 234 | | | | | | | | | | T234I |
| 237 | | | | K237R | K237R | | | | L237V | N237H |
| 271 | | | | | | | | | | T271S |
| 305 | | | | | | | | | | P305S |
| 308 | N308S | | | | | | | | | |
| 310 | T310S | | | | | | | | | |
| 335 | | S335N | S335N | | | | | | | |
| 339 | V339I | | | | | | | | | |
| 340 | P340- | | | | | | | | | |
| 344 | −344K | | | | | | | | S344N | |
| 351 | | | | | | | | | | V351I |
| 404 | | | | | | | | | | −f404L |
| 405 | T405V | | | T405A | T405A | | | | | A405P |
| 406 | | | | | | N406T | | | | |
| 410 | S410T | | | | | | | | | |
| 411 | | | | | | | | | E411G | |
| 412 | | | | | | | | | N412D | N412S |
| 417 | | | | | | | | | V417I | |
| 419 | | | | | | | | | | −f419S |
| 421 | | | | | | | Q421T | Q421T | | |
| 422 | K422R | | | | | | | | V422I | |
| 428 | | | | | | | T428S | T428S | | |
| 474 | | | | | | | S474T | S474T | | |
| 487 | S487A | | | | | | | | | |
| 488 | | | | | | | | | A488R | |
| 491 | | K491R | K491R | | | | T491I | | | |
| 494 | | | | | | | | | K494R | |
| 506 | | | | | | | | | V506I | |
| 526 | −f526Y | | | | | | | | | |
| 529 | | | | | | | | | P529S | |
| 531 | | | | | | | | | T531A | |
| 534 | | | | X534S | X534S | | | | | |
| 535 | | | | | | | | | S535A | |
| 538 | | | | | | | | | I538V | |
| 554 | | | | | | | | | A554P | |
| 555 | | | | | | | | | | S555N |
| 584 | | | | | | | | | V584P | |
| 586 | | | | T586E | T586E | | | | | |
| 589 | −f589L | | | | | | | | | |
| 592 | | | | | | | | | H592Q | R592K |
| 625 | | | | | | S625K | | | | |
| 626 | P626S | | | | | S626P | | | | |
| 631 | | | | S631A | S631A | | | | | |
| 656 | | | | | | | | | | −f656Y |
| 662 | T662N | | | | | | | | | |
| 675 | | | | S675A | S675A | | | | | |
| 679 | | | | | | H679Y | | | | |
| 681 | | | | | | S681H | | | | |
| 685 | | | | | | | I685V | I685V | | |
| 686 | E686K | | | | | | | | | Q686R |
| 687 | I687V | | | | | | | | | |
| 688 | | | | | | T688D | S688D | S688D | | |
| 689 | | | | | | N689A | | | | |
| 690 | N690D | T690V | T690V | | | | | | | |
| 696 | T696G | | | | | | | | | |
| 706 | | | | | | | E706K | E706K | | |
| 709 | S709N | | | | | | | | | |
| 713 | V713I | V713I | V713I | | | | | | | |
| 714 | N714S | | | | | | | | | |
| 721 | | | | | | | L721I | L721I | | |
| 725 | | Y725-f | Y725-f | | | | | | | |
| 734 | | | | N734D | N734D | | | | | |
| 745 | | A745T | A745T | | | | | | | |
| 749 | T749A | Q749K | Q749K | | | | | | | |
| 751 | Q751E | N751D | N751D | | | | | | K751E | V751A |
| 753 | | S753N | S753N | | | | | | | |
| 772 | E772K | | | | | | | | | |
| 786 | | | | | | | | | V786I | |
| 802 | V802I | | | | | | | | | |
| 827 | | | S827N | | | | | | Q827E | |
| 828 | A828P | | | | | S828T | | | | |
| 829 | N829E | | | H829Q | H829Q | | | | | |
| 836 | | | | | | I836V | | | | |
| 838 | | | | X838N | X838N | | | | | |
| 847 | | I847M | I847M | | | | | | | |
| 853 | L853-f | | | | | | | | | K853E |
| 855 | | | | | | | | | S855N | |
| 856 | | S856L | S856L | | | | | | | |
| 858 | | | | I858V | I858V | | | | | |
| 869 | | | | | | V869I | | | | |
| 892 | | | | | | | | | V892I | |
| 893 | N893S | S893L | S893L | | | G893K | | | E893Q | R893Q |
| 894 | | | | | | | T894E | T894E | D894N | E894D |
| 896 | | | | | | | D896E | D896E | | D896E |
| 898 | | | | | | | A898S | A898S | | |
| 911 | | | | K911R | K911R | A911T | | | T911K | |
| 914 | D914E | | | | | | | | A914P | T914E |
| 915 | | | | | | | | | | N915T |
| 916 | | V916I | V916I | | | | | | | |
| 917 | | | | | | | K917R | K917R | | V917T |
| 922 | N922S | | | | | | | | | |
| 923 | S923P | | | | | | | | | |
| 928 | V928I | | | | | | | | | |
| 948 | | | | | | | N948D | N948D | | |
| 952 | | | | | | | | | | V952I |
| 959 | | I959V | I959V | | | | | | | |
| 966 | | | | | | | I966T | I966T | | |
| 973 | | | | | | S973A | | | | |
| 987 | | | | | | | | | N987S | |
| 993 | | R993K | R993K | | | E993N | | | | |
| 995 | E995D | | | | | | | | | |
| 1035 | M1035V | | | | | | | | | |
| 1041 | | | | | | | I1041M | | | |
| 1042 | | I1042V | I1042V | | | | | | | |
| 1071 | | | | | | | | | I1071V | |
| 1092 | | | | D1092E | D1092E | | D1092E | D1092E | | |
| 1102 | | | | | | | S1102N | S1102N | | S1102N |
| 1105 | | | | | | | | | V1105I | |
| 1109 | | | | | | | | | | V1109I |
| 1110 | | | | | | | V1110I | V1110I | | |
| 1164 | | | | I1164V | I1164V | | | | | |
| 1209 | R1209K | | | | | | | | | |
| 1223 | | | | | | | | | | −f1223L |
| 1229 | A1229T | | | | | | | | | |
| 1233 | | | | | | | | | V1233I | |
| 1236 | | | | A1236T | A1236T | | | | | |
| 1238 | | V1238D | V1238D | S1238T | S1238T | | | | | |
| 1246 | | −f1246Y | −f1246Y | | | | | | | |
| 1249 | | | | | | I1249V | | | | |
| 1265 | | | | | | | | | G1265S | |
| 1272 | | | | | | | | | | V1272I |
| 1274 | | | | | | | | | | Y1274H |
| 1277 | V1277M | | | | | | | | | |
| 1278 | | | | | | N1278S | | | | |
| 1294 | | | | | | | | | I1294V | |
| 1299 | | | | | | L1299S | | | | |
| 1305 | | | | | | | P1305S | P1305S | | |
| 1412 | | | | | | | Y1412-f | Y1412-f | | |
| 1418 | | | | | | | V1418I | V1418I | I1418L | |
| 1431 | | | | | | | N1431D | N1431D | | |
| 1432 | A1432V | | | | | | | | | |
| 1437 | | | | | | R1437K | | | | |
| 1440 | | | | | | | | | N1440D | |
| 1441 | | | | | | V1441I | | | | |
| 1442 | | | | | | K1442D | | | | |
| 1443 | | I1443T | I1443T | | | | | | | |
| 1450 | K1450R | | | | | | | | | |
| 1460 | V1460I | | | | | | | | −f1460V | |
| 1461 | | | | | | | | | | V1461M |
| 1467 | | | | | | | | | S1467T | |
| 1469 | | | | R1469K | R1469K | | | | | |
| 1474 | X1474D | | | | | | | | | |
| 1478 | | | | N1478S | N1478S | | | | | |
| 1482 | | | | | | E1482Q | | | | |
| 1491 | | | | V1491I | V1491I | | | | | |
| 1514 | | | | | | V1514A | L1514S | L1514S | | |
| 1521 | | | | | | T1521A | | | | |
| 1530 | K1530E | | | | | | | | | |
| 1538 | | | | | | | | | V1538D | Y1538D |
| 1542 | | | | | | | T1542I | T1542I | | |
| 1550 | | | | | | K1550R | | | | |
| 1556 | | | | N1556S | N1556S | | | | | |
| 1560 | | | | N1560S | N1560S | | | | | |
| 1563 | | | | | | A1563T | | | | |
| 1569 | | | | I1569V | | | | | | |
| 1572 | | | | | | | V1572A | V1572A | | |
| 1600 | | | | I1600V | I1600V | | | | | |
| 1630 | | | | | | | | | E1630D | |
| 1645 | | | | | | I1645V | | | | |
| 1646 | | | | | | | V1646I | V1646I | | |
| 1658 | | V1658I | V1658I | | | | | | | |
| 1662 | | | | H1662Q | H1662Q | A1662T | | | | |
| 1669 | | | | | | | | | Y1669-f | |
| 1672 | | | | Y1672-f | Y1672-f | | | | | |
| 1674 | | | | | | | | | | R1674K |
| 1678 | | | | | | | N1678K | N1678K | | |
| 1682 | | | | | | S1682T | | | | |
| 1687 | | I1687A | I1687A | | | | | | | |
| 1718 | | | | | | | I1718D | I1718D | | |
| 1729 | | | V1729E | | I1729V | | | | I1729V | |
| 1748 | | | | | | | | | S1748N | |
| 1766 | | | | I1766V | I1766V | | | | | |
| 1776 | | | | | | | | | | K1776R |
| 1785 | K1785R | | | | | | | | | |
| 1796 | | | | | | | I1796V | I1796V | I1796V | |
| 1797 | | | | | | | N1797S | N1797S | | |
| 1798 | | | | | | T1798A | | | | |
| 1799 | | | | Q1799K | Q1799K | | | | | |
| 1800 | | | | | | | | | | P1800S |
| 1802 | | | | | | T1802A | | | | |
| 1804 | V1804M | | | | | | L1804I | L1804I | | |
| 1809 | | V1809I | V1809I | | | | | | | |
| 1811 | | | | | | | | | N1811S | |
| 1823 | H1823Y | | | | | | | | | |
| 1825 | I1825V | | | V1825I | V1825I | | | | | |
| 1836 | | | | | | | | | | |
| 1838 | T1838A | | | | | R1838K | K1838R | K1838R | | |
| 1840 | | | | | | | | | T1840A | |
| 1847 | C1847R | | | | | | | | | |
| 1855 | K1855R | | | | | | | | | |
| 1859 | | | | K1859E | K1859E | | | | | |
| 1860 | I1860T | | | | | | | | | |
| 1861 | | | | D1861E | D1861E | | | | −f1861S | |
| 1862 | | | | | | | | | | M1862I |
| 1866 | | | | M1866I | M1866I | | | | | |
| 1870 | | | | | | V1870I | | | | |
| 1883 | P1883S | | | | | | | | | |
| 1885 | E1885D | | | | | | D1885N | D1885N | | |
| 1887 | | | | I1887V | I1887V | | | | | |
| 1888 | | | | A1888T | A1888T | | | | | |
| 1906 | X1906T | | | | | | | | | |
| 1914 | | | | A1914S | A1914S | | | | | |
| 1920 | | | | K1920R | K1920R | | | | | |
| 1926 | | | K1926R | | | S1926T | N1926S | N1926S | | |
| 1928 | | K1928R | K1928R | | | | | | | |
| 1934 | | R1934K | R1934K | | | | | | | |
| 1935 | | | | | | | | | | M1935I |
| 1957 | R1957K | | | | | | | | | |
| 1961 | | | | P1961S | P1961S | | | | | S1961H |
| 1962 | | | | V1962A | V1962A | | | | | A1962T |
| 1973 | | | | | | | I1973V | I1973V | | |
| 1977 | | | | V1977I | V1977I | | | | | |
| 1978 | | | | | | | T1978A | T1978A | | |
| 1989 | | | | | | T1989S | | | | |
| 1992 | S1992L | | | | | | | | | |
| 1997 | | | | | | | | | I1997V | |
| 2008 | | | | | | | | | T2008I | |
| 2040 | R2040K | | | | | | | | | |
| 2047 | | | | | | I2047R | | | | |
| 2052 | R2052K | S2052P | | | | | | | | |
| 2055 | | | | | | | | | | S2055P |

TABLE 5
hrv08.pro.msf MSF: 2255 Type: P October 22, 2008 19:15 Check: 5838

| | | | |
|---|---|---|---|
| Name: annotation | Len: 2255 | Check: 4935 | Weight: 1.00 |
| Name: af499637-cva13 | Len: 2255 | Check: 447 | Weight: 1.00 |
| Name: af546702-cva21 | Len: 2255 | Check: 4642 | Weight: 1.00 |
| Name: v01149-pv1m | Len: 2255 | Check: 6327 | Weight: 1.00 |
| Name: d00239-01 | Len: 2255 | Check: 7463 | Weight: 1.00 |
| Name: pico-01 | Len: 2255 | Check: 6186 | Weight: 1.00 |
| Name: hrv-01 | Len: 2255 | Check: 6203 | Weight: 1.00 |
| Name: x02316-02 | Len: 2255 | Check: 7841 | Weight: 1.00 |
| Name: hrv-07 | Len: 2255 | Check: 5013 | Weight: 1.00 |
| Name: dq473503-07 | Len: 2255 | Check: 3087 | Weight: 1.00 |
| Name: hrv-08 | Len: 2255 | Check: 1247 | Weight: 1.00 |
| Name: pico-09 | Len: 2255 | Check: 6334 | Weight: 1.00 |
| Name: hrv-09 | Len: 2255 | Check: 7236 | Weight: 1.00 |
| Name: hrv-09-f01 | Len: 2255 | Check: 4151 | Weight: 1.00 |
| Name: hrv-09-f02 | Len: 2255 | Check: 4476 | Weight: 1.00 |
| Name: dq473498-10 | Len: 2255 | Check: 850 | Weight: 1.00 |
| Name: hrv-10 | Len: 2255 | Check: 850 | Weight: 1.00 |
| Name: ef173414-11 | Len: 2255 | Check: 8297 | Weight: 1.00 |
| Name: ef173415-12 | Len: 2255 | Check: 6532 | Weight: 1.00 |
| Name: hrv-13 | Len: 2255 | Check: 4848 | Weight: 1.00 |
| Name: hrv-13-f03 | Len: 2255 | Check: 6361 | Weight: 1.00 |
| Name: dq473493-15 | Len: 2255 | Check: 5079 | Weight: 1.00 |
| Name: l24917-16 | Len: 2255 | Check: 9066 | Weight: 1.00 |
| Name: hrv-18 | Len: 2255 | Check: 2115 | Weight: 1.00 |
| Name: hrv-19 | Len: 2255 | Check: 3752 | Weight: 1.00 |
| Name: hrv-20 | Len: 2255 | Check: 5241 | Weight: 1.00 |
| Name: hrv-21 | Len: 2255 | Check: 2811 | Weight: 1.00 |
| Name: hrv-22 | Len: 2255 | Check: 3661 | Weight: 1.00 |
| Name: dq473497-23 | Len: 2255 | Check: 2349 | Weight: 1.00 |
| Name: hrv-24 | Len: 2255 | Check: 8306 | Weight: 1.00 |
| Name: ef173416-24 | Len: 2255 | Check: 7278 | Weight: 1.00 |
| Name: hrv-25 | Len: 2255 | Check: 7535 | Weight: 1.00 |
| Name: dq473508-28 | Len: 2255 | Check: 1578 | Weight: 1.00 |
| Name: hrv-29 | Len: 2255 | Check: 5183 | Weight: 1.00 |
| Name: dq473512-30 | Len: 2255 | Check: 3262 | Weight: 1.00 |
| Name: hrv-30 | Len: 2255 | Check: 3559 | Weight: 1.00 |
| Name: hrv-31 | Len: 2255 | Check: 6949 | Weight: 1.00 |
| Name: hrv-32 | Len: 2255 | Check: 4105 | Weight: 1.00 |
| Name: hrv-33 | Len: 2255 | Check: 7247 | Weight: 1.00 |
| Name: hrv-34 | Len: 2255 | Check: 5118 | Weight: 1.00 |
| Name: dq473501-34 | Len: 2255 | Check: 4982 | Weight: 1.00 |
| Name: dq473505-36 | Len: 2255 | Check: 2273 | Weight: 1.00 |
| Name: hrv-38 | Len: 2255 | Check: 9028 | Weight: 1.00 |
| Name: dq473495-38 | Len: 2255 | Check: 8056 | Weight: 1.00 |
| Name: ay751783-39 | Len: 2255 | Check: 3443 | Weight: 1.00 |
| Name: hrv-40 | Len: 2255 | Check: 6843 | Weight: 1.00 |
| Name: dq473491-41 | Len: 2255 | Check: 7539 | Weight: 1.00 |
| Name: hrv-43 | Len: 2255 | Check: 7974 | Weight: 1.00 |
| Name: dq473499-44 | Len: 2255 | Check: 3531 | Weight: 1.00 |
| Name: hrv-45 | Len: 2255 | Check: 2115 | Weight: 1.00 |
| Name: dq473506-46 | Len: 2255 | Check: 6630 | Weight: 1.00 |
| Name: hrv-47 | Len: 2255 | Check: 6617 | Weight: 1.00 |
| Name: dq473496-49 | Len: 2255 | Check: 8506 | Weight: 1.00 |
| Name: hrv-49-f04 | Len: 2255 | Check: 7414 | Weight: 1.00 |
| Name: hrv-50 | Len: 2255 | Check: 6681 | Weight: 1.00 |
| Name: hrv-51 | Len: 2255 | Check: 7727 | Weight: 1.00 |
| Name: dq473507-53 | Len: 2255 | Check: 6412 | Weight: 1.00 |
| Name: hrv-54 | Len: 2255 | Check: 9861 | Weight: 1.00 |
| Name: hrv-54-f05 | Len: 2255 | Check: 6687 | Weight: 1.00 |
| Name: dq473511-55 | Len: 2255 | Check: 9894 | Weight: 1.00 |
| Name: hrv-56 | Len: 2255 | Check: 2611 | Weight: 1.00 |
| Name: hrv-57 | Len: 2255 | Check: 339 | Weight: 1.00 |
| Name: hrv-58 | Len: 2255 | Check: 9705 | Weight: 1.00 |
| Name: dq473500-59 | Len: 2255 | Check: 2882 | Weight: 1.00 |
| Name: hrv-60 | Len: 2255 | Check: 53 | Weight: 1.00 |
| Name: hrv-61 | Len: 2255 | Check: 9103 | Weight: 1.00 |
| Name: hrv-62 | Len: 2255 | Check: 7013 | Weight: 1.00 |
| Name: hrv-63 | Len: 2255 | Check: 4641 | Weight: 1.00 |
| Name: hrv-64 | Len: 2255 | Check: 5394 | Weight: 1.00 |
| Name: ef173417-64 | Len: 2255 | Check: 3160 | Weight: 1.00 |
| Name: hrv-65 | Len: 2255 | Check: 3638 | Weight: 1.00 |
| Name: hrv-66 | Len: 2255 | Check: 7130 | Weight: 1.00 |
| Name: hrv-67 | Len: 2255 | Check: 7013 | Weight: 1.00 |
| Name: hrv-68 | Len: 2255 | Check: 4503 | Weight: 1.00 |
| Name: hrv-71 | Len: 2255 | Check: 1844 | Weight: 1.00 |
| Name: dq473492-73 | Len: 2255 | Check: 5881 | Weight: 1.00 |
| Name: dq473494-74 | Len: 2255 | Check: 9321 | Weight: 1.00 |
| Name: dq473510-75 | Len: 2255 | Check: 2355 | Weight: 1.00 |
| Name: dq473502-76 | Len: 2255 | Check: 3906 | Weight: 1.00 |
| Name: hrv-76 | Len: 2255 | Check: 3651 | Weight: 1.00 |
| Name: hrv-77 | Len: 2255 | Check: 1505 | Weight: 1.00 |
| Name: hrv-78 | Len: 2255 | Check: 1027 | Weight: 1.00 |
| Name: ef173418-78 | Len: 2255 | Check: 369 | Weight: 1.00 |
| Name: hrv-80 | Len: 2255 | Check: 7222 | Weight: 1.00 |
| Name: hrv-81 | Len: 2255 | Check: 5990 | Weight: 1.00 |
| Name: hrv-81-f06 | Len: 2255 | Check: 5925 | Weight: 1.00 |
| Name: hrv-81-f07 | Len: 2255 | Check: 5782 | Weight: 1.00 |
| Name: hrv-82 | Len: 2255 | Check: 9248 | Weight: 1.00 |
| Name: dq473509-82 | Len: 2255 | Check: 9925 | Weight: 1.00 |
| Name: hrv-85 | Len: 2255 | Check: 854 | Weight: 1.00 |
| Name: pico-85 | Len: 2255 | Check: 1136 | Weight: 1.00 |
| Name: dq473504-88 | Len: 2255 | Check: 95 | Weight: 1.00 |
| Name: a10937-89 | Len: 2255 | Check: 3855 | Weight: 1.00 |
| Name: hrv-89 | Len: 2255 | Check: 4028 | Weight: 1.00 |
| Name: hrv-89-f08 | Len: 2255 | Check: 2571 | Weight: 1.00 |
| Name: hrv-89-f09 | Len: 2255 | Check: 2618 | Weight: 1.00 |
| Name: m16248-89 | Len: 2255 | Check: 3855 | Weight: 1.00 |
| Name: hrv-90 | Len: 2255 | Check: 4017 | Weight: 1.00 |
| Name: hrv-94 | Len: 2255 | Check: 5578 | Weight: 1.00 |
| Name: ef173419-94 | Len: 2255 | Check: 5531 | Weight: 1.00 |
| Name: hrv-95 | Len: 2255 | Check: 2386 | Weight: 1.00 |
| Name: hrv-96 | Len: 2255 | Check: 2237 | Weight: 1.00 |
| Name: hrv-98 | Len: 2255 | Check: 2787 | Weight: 1.00 |
| Name: hrv-100 | Len: 2255 | Check: 9900 | Weight: 1.00 |
| Name: ef186077-qpm | Len: 2255 | Check: 6593 | Weight: 1.00 |
| Name: ef077279-nat001 | Len: 2255 | Check: 536 | Weight: 1.00 |
| Name: ny1078 | Len: 2255 | Check: 1461 | Weight: 1.00 |
| Name: ef582385-c024 | Len: 2255 | Check: 3450 | Weight: 1.00 |
| Name: ef077280-nat045 | Len: 2255 | Check: 558 | Weight: 1.00 |
| Name: ef582387-c026 | Len: 2255 | Check: 7362 | Weight: 1.00 |
| Name: ef582386-c025 | Len: 2255 | Check: 255 | Weight: 1.00 |
| Name: dq473485-03 | Len: 2255 | Check: 5948 | Weight: 1.00 |
| Name: ef173422-03 | Len: 2255 | Check: 6362 | Weight: 1.00 |
| Name: dq473490-04 | Len: 2255 | Check: 8918 | Weight: 1.00 |
| Name: hrv-05 | Len: 2255 | Check: 3037 | Weight: 1.00 |
| Name: dq473486-06 | Len: 2255 | Check: 2318 | Weight: 1.00 |
| Name: l05355-14 | Len: 2255 | Check: 153 | Weight: 1.00 |
| Name: k02121-14 | Len: 2255 | Check: 86 | Weight: 1.00 |
| Name: ef173420-17 | Len: 2255 | Check: 3028 | Weight: 1.00 |
| Name: hrv-26 | Len: 2255 | Check: 7203 | Weight: 1.00 |
| Name: hrv-27 | Len: 2255 | Check: 815 | Weight: 1.00 |
| Name: ef173421-27 | Len: 2255 | Check: 815 | Weight: 1.00 |
| Name: dq473487-35 | Len: 2255 | Check: 3021 | Weight: 1.00 |
| Name: hrv-35 | Len: 2255 | Check: 2541 | Weight: 1.00 |
| Name: ef173423-37 | Len: 2255 | Check: 5738 | Weight: 1.00 |
| Name: hrv-42 | Len: 2255 | Check: 1573 | Weight: 1.00 |
| Name: dq473488-48 | Len: 2255 | Check: 2160 | Weight: 1.00 |
| Name: hrv-52 | Len: 2255 | Check: 4800 | Weight: 1.00 |
| Name: hrv-52-f10 | Len: 2255 | Check: 1413 | Weight: 1.00 |
| Name: ef173424-52 | Len: 2255 | Check: 5880 | Weight: 1.00 |
| Name: hrv-69 | Len: 2255 | Check: 7959 | Weight: 1.00 |
| Name: dq473489-70 | Len: 2255 | Check: 7471 | Weight: 1.00 |
| Name: hrv-72 | Len: 2255 | Check: 1505 | Weight: 1.00 |
| Name: hrv-79 | Len: 2255 | Check: 2821 | Weight: 1.00 |
| Name: hrv-83 | Len: 2255 | Check: 4330 | Weight: 1.00 |
| Name: hrv-84 | Len: 2255 | Check: 6613 | Weight: 1.00 |
| Name: hrv-86 | Len: 2255 | Check: 3381 | Weight: 1.00 |
| Name: hrv-91 | Len: 2255 | Check: 8414 | Weight: 1.00 |
| Name: hrv-92 | Len: 2255 | Check: 2492 | Weight: 1.00 |
| Name: ef173425-93 | Len: 2255 | Check: 691 | Weight: 1.00 |
| Name: hrv-97 | Len: 2255 | Check: 981 | Weight: 1.00 |
| Name: hrv-99 | Len: 2255 | Check: 839 | Weight: 1.00 |
| // | | | |

| | |
|---|---|
| | 1 50 |
| annotation | M......... .......... .......... .......... .........H |
| af499637-cva13 | MGAQVSSQKV GAHENTNVAT GGSTVNYTTI NYYKDSASNA ASKQDFSQDP |
| af546702-cva21 | MGAQVSTQKT GAHENQNVAA NGSTINYTTI NYYKDSASNS ATRQDLSQDP |
| v01149-pv1m | MGAQVSSQKV GAHENSNRAY GGSTINYTTI NYYRDSASNA ASKQDFSQDP |
| d00239-01 | MGAQVSRQNV GTHSTQNSVS NGSSLNYFNI NYFKDAASSG ASRLDFSQDP |
| pico-01 | MGAQVSRQNV GTHSTQNSVS NGSSLNYFNI NYFKDAASSG ASRLDFSQDP |
| hrv-01 | MGAQVSRQNV GTHSTQNSVS NGSSLNYFNI NYFKDAASSG ASRLDFSQDP |
| x02316-02 | MGAQVSRQNV GTHSTQNSVS NGSSLNYFNI NYFKDAASNG ASKLEFTQDP |
| hrv-07 | MGAQVSRQNV GTHSTQNAVT NGSSLNYFNI NYFKDAASSG ASRLDFSQDP |
| dq473503-07 | MGAQVSRQNV GTHSTQNAVT NGSSLNYFNI NYFKDAASSG ASRLDFSQDP |
| hrv-08 | MGAQVSRQNV GTHSTQNAVS GGSSLNYFNI NYFKDAASSG ASRLDFSQDP |
| pico-09 | MGAQVSRQNV GTHSTQNSVT NGSSLNYFNI NYFKDAASSR ASKLEFSQDP |
| hrv-09 | MGAQVSRQNV GTHSTQNSVS NGSSLNYFNI NYFKDAASSG ASKLEFSQDP |
| hrv-09-f01 | MGAQVSRQNV GTHSTQNSVS NGSSLNYFNI NYFKDAASSG ASKLEFSQDP |
| hrv-09-f02 | MGAQVSRQNV GTHSTQNSVS NGSSLNYFNI NYFKDAASSG ASKLEFSQDP |
| dq473498-10 | MGAQVSRQNV GTHSTQNAVS NGSSLNYFNI NYFKDAASSG ASKLEFSQDP |
| hrv-10 | MGAQVSRQNV GTHSTQNAVS NGSSLNYFNI NYFKDAASSG ASKLEFSQDP |
| ef173414-11 | MGAQVSRQNV GTHSTQNSVS NGSSLNYFNI NYFKDAASSG ASKLEFSQDP |
| ef173415-12 | MGAQVSRQNV GTHSTQNSVS NGSSLNYFNI NYFKDAASSG ASRLDFSQDP |
| hrv-13 | MGAQVSRQNV GTHSTQNSVS NGSSLNYFNI NYFKDAASSG ASKLEFSQDP |
| hrv-13-f03 | MGAQVSRQNV GTHSTQNSVS NGSSLNYFNI NYFKDAASSG ASKLEFSQDP |
| dq473493-15 | MGAQVSRQNV GTHSTQNTVS NGSSLNYFNI NYFKDAASSG ASKLEFSQDP |
| l24917-16 | MGAQVSRQNV GTHSTQNMVS NGSSLNYFNI NYFKDAASSG ASRLDFSQDP |
| hrv-18 | MGAQVSRQNV GTHSTQNSVS NGSSLNYFNI NYFKDAASHG ASKLDFSQDP |
| hrv-19 | MGAQVSRQNV GTHSTQNSVS NGSSLNYFNI NYFKDAASSG ASKLEFSQDP |
| hrv-20 | MGAQVSRQNV GTHSTQNAVS NGSSLNYFNI NYFKDAASSG ASRLDFSQDP |
| hrv-21 | MGTQVSRQNV GTHSTQNSVS NGSSLNYFNI NYFKDAASSG ASKLEFSQDP |
| hrv-22 | MGAQVSRQNV GTHSTQNTVS NGSSLNFFNI NYFKDAASSG ASKLEFSQDP |
| dq473497-23 | MGAQVSRQNV GTHSTQNSVS NGSSLNYFNI NYFKDAASNG ASKLEFSQDP |
| hrv-24 | MGAQVSRQNV GTHSTQNSVS NGSSLNYFNI NYFKDAASSG ASKLEFSQDP |
| ef173416-24 | MGAQVSRQNV GTHSTQNSVS NGSSLNYFNI NYFKDAASSG ASKLEFSQDP |
| hrv-25 | MGAQVSRQNV GTHSTQNSVS NGSSLNYFNI NYFKDAASSG ASKLEFSQDP |
| dq473508-28 | MGAQVSRQNV GTHTTQNAVS NGSSLNYFNI NYFKDAASSG ASRLDFSQDP |
| hrv-29 | MGAQVSRQNV GTHSTQNSVS NGSSLNYFNI NYFKDAASSG ASKLEFSQDP |
| dq473512-30 | MGAQVSRQNV GTHSTQNSVS NGSSLNYFNI NYFKDAASNG ASKLDFTQDP |
| hrv-30 | MGAQVSRQNV GTHSTQNSVS NGSSLNYFNI NYFKDAASNG ASKLDFTQDP |
| hrv-31 | MGAQVSRQNV GTHSTQNMVS NGSSLNYFNI NYFKDAASSG ASRLDFSQDP |
| hrv-32 | MGAQVSRQNV GTHSTQNSVT NGSSLNYFNI NYFKDAASSG ASKLEFSQDP |
| hrv-33 | MGAQVSRQNV GTHSTQNAVS NGSSLNYFNI NYFKDAASSG ASKLEFSQDP |
| hrv-34 | MGAQVSRQNV GTHSTQNTVS NGSSLNYFNI NYFKDAASHG ASKLDFSQDP |
| dq473501-34 | MGAQVSRQNV GTHSTQNTVS NGSSLNYFNI NYFKDAASHG ASKLDFSQDP |
| dq473505-36 | MGAQVSRQNV GTHSTQNSVS NGSSLNYFNI NYFKDAASSG ASRLDFSQDP |
| hrv-38 | MGAQVSRQNV GTHSTQNSVS NGSSLNYFNI NYFKDAASSG ASKLEFSQDP |
| dq473495-38 | MGAQVSRQNV GTHSTQNSVS NGSSLNYFNI NYFKDAASSG ASKLEFSQDP |
| ay751783-39 | MGAQVSRQNV GTHSTQNSVS GGSSLNYFNI NYFKDAASSG ASKLEFSQDP |
| hrv-40 | MGAQVSRQNV GTHSTQNSVS NGSSLNYFNI NYFKDAASSG ASKLEFSQDP |
| dq473491-41 | MGAQVSRQNV GTHSTQNSVS NGSSLNYFNI NYFKDAASSG ASKLEFSQDP |
| hrv-43 | MGAQVSRQNV GTHSTQNTVS NGSSLNYFNI NYFKDAASSG ASKLEFSQDP |
| dq473499-44 | MGAQVSRQNV GTHSTQNSVS NGSSLNYFNI NYFKDAASSG ASKLEFSQDP |
| hrv-45 | MGAQVSRQNV GTHSTQNTVT GGSSLNYFNI NYFKDAASSG ASRLDFSQDP |
| dq473506-46 | MGAQVSRQNV GTHSTQNTVA NGSSLNYFNI NYFKDAASSG ASRLDFSQDP |
| hrv-47 | MGAQVSRQNV GTHSTQNMVS NGSSLNYFNI NYFKDAASSG ASKLEFSQDP |
| dq473496-49 | MGAQVSRQNV GTHSTQNSVS NGSSLNYFNI NYFKDAASNG ASKLEFTQDP |
| hrv-49-f04 | MGAQVSRQNV GTHSTQNSVS NGSSLNYFNI NYFKDAASNG ASKLEFTQDP |
| hrv-50 | MGAQVSRQNV GTHSTQNSVS NGSSLNYFNI NYFKDAASHG ASKLDFSQDP |
| hrv-51 | MGAQVSRQNV GTHSTQNTVA NGSSLNYFNI NYFKDAASSG ASRLDFSQDP |
| dq473507-53 | MGAQVSRQNV GTHSTQNAVT NGSSLNYFNI NYFKDAASSG ASRLDFSQDP |
| hrv-54 | MGAQVSRQNV GTHSTQNSVS NGSSLNYFNI NYFKDAASSG ASKLEFSQDP |
| hrv-54-f05 | MGAQVSRQNV GTHSTQNSVS NGSSLNYFNI NYFKDAASSG ASKLEFSQDP |
| dq473511-55 | MGAQVSRQNV GTHSTQNSVS NGSSLNYFNI NYFKDAASSG ASKLEFSQDP |
| hrv-56 | MGAQVSRQNV GTHSTQNTVS NGSSLNYFNI NYFKDAASSG ASKLEFSQDP |
| hrv-57 | MGAQVSRQNV GTHSTQNSVS NGSSLNYFNI NYFKDAASSG ASKLEFSQDP |
| hrv-58 | MGAQVSRQNV GTHSTQNSVS NGSSLNYFNI NYFKDAASSX ASRLDFSQDP |
| dq473500-59 | MGAQVSRQNV GTHSTQNSVS NGSSLNYFNI NYFKDAASSG ASKLEFSQDP |
| hrv-60 | MGAQVSRQNV GTHSTQNVVS SGSSLNYFNI NYFKDAASSG ASKLEFSQDP |
| hrv-61 | MGAQVSRQNV GTHSTQNSVS NGSSLNYFNI NYFKDAASSG ASKLEFSQDP |
| hrv-62 | MGAQVSRQNV GTHSTQNSVS NGSSLNYFNI NYFKDAASSG ASKLEFSQDP |
| hrv-63 | MGAQVSRQNV GTHSTQNSVS NGSSLNYFNI NYFKDAASSG ASKLEFSQDP |
| hrv-64 | MGAQVSRQNV GTHSTQNSVS NGSSLNFFNI NYFKDAASSG ASKLEFSQDP |
| ef173417-64 | MGAQVSRQNV GTHSTQNSVS NGSSLNFFNI NYFKDAASSG ASKLEFSQDP |
| hrv-65 | MGAQVSRQNV GTHSTQNTVA NGSSLNYFNI NYFKDAASNG ASRLDFSQDP |
| hrv-66 | MGAQVSRQNV GTHSTQNAVS NGSSLNYFNI NYFKDAASSG ASKLEFSQDP |
| hrv-67 | MGAQVSRQNV GTHSTQNSVS NGSSLNYFNI NYFKDAASSG ASKLEFSQDP |
| hrv-68 | MGAQVSRQNV GTHSTQNAVS NGSSLNYFNI NYFKDAASSG ASRLDFSQDP |
| hrv-71 | MGAQVSRQNV GTHSTQNTVA NGSSLNYFNI NYFKDAASNG ASRLDFSQDP |
| dq473492-73 | MGAQVSRQNV GTHSTQNSVT NGSSLNYFNI NYFKDAASSG ASKLEFSQDP |
| dq473494-74 | MGAQVSRQNV GTHSTQNSVS NGSSLNYFNI NYFKDAASSG ASKLEFSQDP |
| dq473510-75 | MGAQVSRQNV GTHSTQNAVS NGSSLNYFNI NYFKDAASSG ASKLEFSQDP |
| dq473502-76 | MGAQVSRQNV GTHSTQNAVS NGSSLNYFNI NYFKDAASSG ASKLEFSQDP |
| hrv-76 | MGAQVSRQNV GTHSTQNAVS NGSSLNYFNI NYFKDAASSG ASKLEFSQDP |
| hrv-77 | MGAQVSRQNV GTHSTQNMVS NGSSLNYFNI NYFKDAASSG ASKLEFSQDP |
| hrv-78 | MGAQVSRQNV GTHSTQNSVS NGSSLNYFNI NYFKDAASSG ASRLDFSQDP |
| ef173418-78 | MGAQVSRQNV GTHSTQNSVS NGSSLNYFNI NYFKDAASSG ASRLDFSQDP |
| hrv-80 | MGAQVSRQNV GTHSTQNAVT NGSSLNYFNI NYFKDAASSG ASRLDFSQDP |
| hrv-81 | MGAQVSRQNV GTHSTQNSVS NGSSLNYFNI NYFKDAASSG ASRLDFSQDP |
| hrv-81-f06 | MGAQVSRQNV GTHSTQNSVS NGSSLNYFNI NYFKDAASSG ASRLDFSQDP |
| hrv-81-f07 | MGAQVSRQNV GTHSTQNSVS NGSSLNYFNI NYFKDAASSG ASRLDFSQDP |
| hrv-82 | MGAQVSRQNV GTHSTQNMVS NGSSLNYFNI NYFKDAASSG ASKLEFSQDP |
| dq473509-82 | MGAQVSRQNV GTHSTQNMVS NGSSLNYFNI NYFKDAASSG ASKLEFSQDP |
| hrv-85 | MGAQVSRQNV GTHSTQNSVS NGSSLNYFNI NYFKDAASSG ASKLEFSQDP |
| pico-85 | MGAQVSRQNV GTHSTQNSVS NGSSLNYFNI NYFKDAASSG ASKLEFSQDP |
| dq473504-88 | MGAQVSRQNV GTHSTQNAVT NGSSLNYFNI NYFKDAASSG ASRLDFSQDP |
| a10937-89 | MGAQVSRQNV GTHSTQNSVS NGSSLNYFNI NYFKDAASSG ASRLDFSQDP |
| hrv-89 | MGAQVSRQNV GTHSTQNSVS NGSSLNYFNI NYFKDAASSG ASRLDFSQDP |
| hrv-89-f08 | MGAQVSRQNV GTHSTQNSVS NGSSLNYFNI NYFKDAASSG ASRLDFSQDP |
| hrv-89-f09 | MGAQVSRQNV GTHSTQNSVS NGSSLNYFNI NYFKDAASSG ASRLDFSQDP |
| m16248-89 | MGAQVSRQNV GTHSTQNSVS NGSSLNYFNI NYFKDAASSG ASRLDFSQDP |
| hrv-90 | MGAQVSRQNV GTHSTQNSVS NGSSLNYFNI NYFKDAASSG ASKLEFSQDP |
| hrv-94 | MGAQVSRQNV GTHSTQNSVS NGSSLNYFNI NYFKDAASSG ASKLEFSQDP |
| ef173419-94 | MGAQVSRQNV GTHSTQNSVS NGSSLNYFNI NYFKDAASSG ASKLEFSQDP |
| hrv-95 | MGAQVSRQNV GTHSTQNAVS GGSSLNYFNI NYFKDAASSG ASRLDFSQDP |
| hrv-96 | MGAQVSRQNV GTHSTQNSVS NGSSLNYFNI NYFKDAASSG ASKLEFSQDP |
| hrv-98 | MGAQVSRQNV GTHSTQNSVS NGSSLNYFNI NYFKDAASSG ASKLEFSQDP |
| hrv-100 | MGAQVSRQNV GTHSTQNTVS NGSSLNYFNI NYFKDAASSG ASKLEFSQDP |
| ef186077-qpm | MGAQVSRQSV GSHETMIHAG TGAVVKYFNV NYYKDAASSG LTKQDFSQDP |
| ef077279-nat001 | MGAQVSRQSV GSHETMIHAG TGAVVKYFNV NYYKDAASSG LSKQDFSQDP |
| ny1078 | MGAQVSKQSV GAHETMVHAG SGAVVKYFNI NYYKDAASSG LTKQDFSQDP |
| ef582385-c024 | MGAQVSKQNV GSHENSVSAT GGSVIKYFNI NYYKDSASSG LTKQDFSQDP |
| ef077280-nat045 | MGAQVSKQNV GSHENSVSAS GGSVIKYFNI NYYKDSASSG LTKQDFSQDP |
| ef582387-c026 | MGAQVSRQSV GSHETMIHAG TGAVVKYFNV NYYKDAASSG LTKQDFSQDP |
| ef582386-c025 | MGAQVSKQNV GSHESGISAS SGSVIKYFNI NYYKDSASSG LSKQDFSMDP |
| dq473485-03 | MGAQVSTQKS GSHENQNILT NGSNQTFTVI NYYKDAASSS SAGQSFSMDP |
| ef173422-03 | MGAQVSTQKS GSHENQNILT NGSNQTFTVI NYYKDAASSS SAGQSFSMDP |
| dq473490-04 | MGAQVSTQKS GSHENQNILT NGSNQTFTVI NYYKDAASSS SAGQSLSMDP |
| hrv-05 | MGAQVSTQKS GSHENQNILT NGSNQTFTVI NYYKDAASSS SAGQSFSMDP |
| dq473486-06 | MGAQVSTQKS GSHENQNILT NGSNQTFTVI NYYKDAASSS SAGQSFSTDP |
| l05355-14 | MGAQVSTQKS GSHENQNILT NGSNQTFTVI NYYKDAASTS SAGQSLSMDP |
| k02121-14 | MGAQVSTQKS GSHENQNILT NGSNQTFTVI NYYKDAASTS SAGQSLSMDP |
| ef173420-17 | MGAQVSTQKS GSHENQNILT NGSTQHFTVI NYYKDAASSS SAGQSFSMDP |
| hrv-26 | MGAQVSTQKS GSHENQNFLS NGSNQTFTVI NYYKDAASSS SAGQSLSMDP |
| hrv-27 | MGAQVSTQKS GSHENQNILT NGSNQTFTVI NYYKDAASSS SAGQSFSMDP |
| ef173421-27 | MGAQVSTQKS GSHENQNILT NGSNQTFTVI NYYKDAASSS SAGQSFSMDP |
| dq473487-35 | MGAQVSTQKS GSHENQNILT NGSHQTFTVI NYYKDAASSS SASQSFSMDP |
| hrv-35 | MGAQVSTQKS GSHENQNILT NGSHQTFTVI NYYKDAASSS SASQSFSMDP |
| ef173423-37 | MGAQVSTQKS GSHENQNILT NGSNQTFTVI NYYKDAASSS SASQSFSMDP |
| hrv-42 | MGAQVSTQKS GSHENQNILT NGSNQTFTVI NYYKDAASSS SAGQSLSMDP |
| dq473488-48 | MGAQVSTQKT GSHENQNILT NGSTQHFTVI NYYKDAASSS SAGQSFSMDP |
| hrv-52 | MGAQVSTQKS GSHENQNILT NGSTQNFTVI NYYKDAASSS SAGQSFSMDP |
| hrv-52-f10 | MGAQVSTQKS GSHENQNILT NGSTQNFTVI NYYKDAASSS SAGQSFSMDP |
| ef173424-52 | MGAQVSTQKS GSHENQNILT NGSTQNFTVI NYYKDAASSS SAGQSFSMDP |
| hrv-69 | MGAQVSTQKS GSHENQNILT NGSTQHFTVI NYYKDAASSS SAGQSFSMDP |
| dq473489-70 | MGAQVSTQRS GSHENQNILT NGSTQHFTVI NYYKDAASSS SAGQSFSMDP |
| hrv-72 | MGAQVSTQKS GSHENQNILT NGSNQTFTVI NYYKDAASSS SAGQSLSMDP |
| hrv-79 | MGAQVSTQKS GSHENQNILT NGSHQTFTVI NYYKDAASSS SAGQSLSMDP |
| hrv-83 | MGAQVSTQKS GSHENQNILT NGSHQTFTVI NYYKDAASSS SAGQSLSMDP |
| hrv-84 | MGAQVSTQKS GSHENQNFLT NGSNQTFTVI NYYKDAASSS SAGQSLSMDP |
| hrv-86 | MGAQVSTQRS GSHENQNILT NGSHQTFTVI NYYKDAASAS SAGQSFSMDP |
| hrv-91 | MGAQVSTQKS GSHENQNILT NGSTQHFTVI NYYKDAASSS SASQSFSMDP |
| hrv-92 | MGAQVSTQKS GSHENQNILT NGSHQTFTVI NYYKDAASSS SAGQSLSMDP |
| ef173425-93 | MGAQISTQKS GSHENQNILT NGSNQTFTVI NYYKDAASSS SAGQSLSMDP |
| hrv-97 | MGAQVSTQKS GSHENQNILT NGSHQTFTVI NYYKDAASSS SAGQSLSMDP |
| hrv-99 | MGAQVSTQKS GSHENQNILT NGSNQTFTVI NYYKDAASSS SAGQSLSMDP |
| | 51 100 |
| annotation | HHHHH..... ........QS .......... ........BB BBB....... |
| af499637-cva13 | SKFTEPVKDV LIKSAPALNS PNIEACGYSD RVMQLTLGNS TITTQEAANS |
| af546702-cva21 | SKFTEPVKDL MLKTAPALNS PNVEACGYSD RVRQITLGNS TITTQEAANA |
| v01149-pv1m | SKFTEPIKDV LIKTAPMLNS PNIEACGYSD RVLQLTLGNS TITTQEAANS |
| d00239-01 | SKFTDPVKDV LEKGIPTLQS PSVEACGYSD RIIQITRGDS TITSQDVANA |
| pico-01 | SKFTDPVKDV LEKGIPTLQS PSVEACGYSD RIMQITRGDS TITSQDVANA |
| hrv-01 | SKFTDPVKDV LEKGIPTLQS PSVEACGYSD RIMQITRGDS TITSQDVANA |
| x02316-02 | SKFTDPVKDV LEKGIPTLQS PTVEACGYSD RIIQITRGDS TITSQDVANA |
| hrv-07 | SKFTDPVKDV LEKGIPTLQS PTVEACGYSD RLMQITRGDS TITSQDIANA |
| dq473503-07 | SKFTDPVKDV LEKGIPTLQS PTVEACGYSD RLMQITRGDS TITSQDIANA |
| hrv-08 | SKFTDPVKDV LTKGIPTLQS PTVEACGYSD RIIQITRGDT TITSQDIANA |
| pico-09 | SKFTDPVKSV LEKGIPTLQS PTVEACGYSD RIIQITRGDS TITSQDVANA |
| hrv-09 | SKFTDPVKDV LEKGIPTLQS PTVEACGYSD RIIQITRGDS TITSQDVANA |
| hrv-09-f01 | SKFTDPVKDV LEKGIPTLQS PTVEACGYSD RIIQITRGDS TITSQDVANA |
| hrv-09-f02 | SKFTDPVKDV LEKGIPTLQS PTVEACGYSD RIIQITRGDS TITSQDVANA |
| dq473498-10 | SKFTDPVKDV LEKGIPTLQS PTVEACGYSD RIIQITRGDS TITSQDVANA |
| hrv-10 | SKFTDPVKDV LEKGIPTLQS PTVEACGYSD RIIQITRGDS TITSQDVANA |
| ef173414-11 | SKFTDPVKDV LEKGIPTLQS PTVEACGYSD RIIQITRGDS TITSQDVANA |
| ef173415-12 | SKFTDPVKDV LTKGIPTLQS PTVEACGYSD RIIQITRGDS TITSQDIANA |
| hrv-13 | SKFTDPVKDV LEKGIPTLQS PTVEACGYSD RIIQITRGDS TITSQDVANA |
| hrv-13-f03 | SKFTDPVKDV LEKGIPTLQS PTVEACGYSD RIIQITRGDS TITSQDVANA |
| dq473493-15 | SKFTDPVKDV LEKGIPTLQS PTVEACGYSD RIIQITRGDS TITSQDVANA |
| l24917-16 | SKFTDPVKDV LEKGIPTLQS PSVEACGYSD RIIQITRGDS TITSQDVANA |
| hrv-18 | SKFTDPVKDV LEKGIPTLQS PTVEACGYSD RIIQITRGDS TITSQDVANA |
| hrv-19 | SKFTDPVKDV LEKGIPTLQS PTVEACGYSD RIIQITRGDS TITSQXVANA |
| hrv-20 | SKFTDPVKDV LLKDIPTLQS PSVEACGYSD RIIQITRGNS TITSQDIANA |
| hrv-21 | SKFTDPVKDV LEKGIPTLQS PTVEACGYSD RIIQITRGDS TITSQDVANA |
| hrv-22 | SKFTDPVKDV LEKGIPTLQS PTVEACGYSD RIIQITRGDS TITSQDVANA |
| dq473497-23 | SKFTDPVKDV LEKGIPTLQS PTVEACGYSD RIIQITRGDS TITSQDVANA |
| hrv-24 | SKFTDPVKDV LEKGIPTLQS PTVEACGYSD RIMQITRGDS TITSQDVANA |
| ef173416-24 | SKFTDPVKDV LEKGIPTLQS PTVEACGYSD RIMQITRGDS TITSQDVANA |
| hrv-25 | SKFTDPVKDV LEKGIPTLQS PTVEACGYSD RIMQITRGDS TITSQDVANA |
| dq473508-28 | SKFTDPVKDV LTKGIPTLQS PSVEACGYSD RIMQITRGNS TITSQDVANA |
| hrv-29 | SKFTDPVKDV LEKGIPTLQS PTVEACGYSD RIMQITRGDS TITSQDVANA |
| dq473512-30 | SKFTDPVKDV LEKGIPTLQS PTVEACGYSD RIIQITRGDS TITSQDVANA |
| hrv-30 | SKFTDPVKDV LEKGIPTLQS PTVEACGYSD RIIQITRGDS TITSQDVANA |
| hrv-31 | SKFTDPVKDV LEKGIPTLQS PTVEACGYSD RIMQITRGDS TITSQDVANA |
| hrv-32 | SKFTDPVKDV LEKGIPTLQS PTVEACGYSD RIIQITRGDS TITSQDVANA |
| hrv-33 | SKFTDPVKDV LEKGIPTLQS PTVEACGYSD RIIQITRGDS TITSQDVANA |
| hrv-34 | SKFTDPVKDV LEKGIPTLQS PTVEACGYSD RIIQITRGDS TITSQDVANA |
| dq473501-34 | SKFTDPVKDV LEKGIPTLQS PTVEACGYSD RIIQITRGDS TITSQDVANA |
| dq473505-36 | SKFTDPVKDV LEKGIPTLQS PTVEACGYSD RLIQITRGDS TITSQDIANA |
| hrv-38 | SKFTDPVKDV LEKGIPTLQS PTVEACGYSD RIIQITRGDS TITSQDVANA |
| dq473495-38 | SKFTDPVKDV LEKGIPTLQS PTVEACGYSD RIIQITRGDS TITSQDVANA |
| ay751783-39 | SKFTDPVKDV LEKGIPTLQS PTVEACGYSD RIIQITRGDS TITSQDVANA |
| hrv-40 | SKFTDPVKDV LEKGIPTLQS PTVEACGYSD RIIQITRGDS TITSQDVANA |
| dq473491-41 | SKFTDPVKDV LEKGIPTLQS PTVEACGYSD RIIQITRGDS TITSQDVANA |
| hrv-43 | SKFTDPVKDV LEKGIPTLQS PTVEACGYSD RIIQITRGDS TITSQDVANA |
| dq473499-44 | SKFTDPVKDV LEKGIPTLQS PTVEACGYSD RIMQITRGDS TITSQDVANA |
| hrv-45 | SKFTDPVKDV LTKGIPTLQS PTVEACGYSD RIIQITRGDT TITSQDIANA |
| dq473506-46 | SKFTDPVKDV LTKGIPTLQS PSVEACGYSD RIIQITRGNS TITSQDIANA |
| hrv-47 | SKFTDPVKDV LEKGIPTLQS PTVEACGYSD RIMQITRGDS TITSQDVANA |
| dq473496-49 | SKFTDPVKDV LEKGIPTLQS PTVEACGYSD RIIQITRGDS TITSQDVANA |
| hrv-49-f04 | SKFTDPVKDV LEKGIPTLQS PTVEACGYSD RIIQITRGDS TITSQDVANA |
| hrv-50 | SKFTDPVKDV LEKGIPTLQS PTVEACGYSD RIIQITRGDS TITSQDVANA |
| hrv-51 | SKFTDPVKDV LIKGVPTLQS PTVEACGYSD RIIQITRGNS TITSQDIANA |
| dq473507-53 | SKFTDPVKDV LTKGIPTLQS PSVEACGYSD RIIQITRGNS TITSQDVANA |
| hrv-54 | SKFTDPVKDV LEKGIPTLQS PTVEACGYSD RIIQITRGDS TMTSQDVANA |
| hrv-54-f05 | SKFTDPVKDV LEKGIPTLQS PTVEACGYSD RIIQITRGDS TITSQDVANA |
| dq473511-55 | SKFTDPVKDV LEKGIPTLQS PSVEACGYSD RIIQITRGDS TITSQDVANA |
| hrv-56 | SKFTDPVKDV LEKGIPTLQS PTVEACGYSD RIIQITRGDS TITSQDVANA |
| hrv-57 | SKFTDPVKDV LEKGIPTLQS PTVEACGYSD RIIQITRGDS TITSQDVANA |
| hrv-58 | SKFTDPVKDV LEKGIPTLQS PTVEACGYSD RLIQITRGDS TITSQDIANA |
| dq473500-59 | SKFTDPVKDV LEKGIPTLQS PTVEACGYSD RIIQITRGDS TITSQDVANA |
| hrv-60 | SKFTDPVKDV LEKGIPTLQS PTVEACGYSD RIIQITRGDS TIISQDVANA |
| hrv-61 | SKFTDPVKDV LEKGIPTLQS PTVEACGYSD RIIQITRGDS TITSQDVANA |
| hrv-62 | SKFTDPVKDV LEKGIPTLQS PTVEACGYSD RIIQITRGDS TITSQDVANA |
| hrv-63 | SKFTDPVKDV LEKGIPTLQS PTVEACGYSD RIIQITRGDS TITSQDVANA |
| hrv-64 | SKFTDPVKDV LEKGIPTLQS PTVEACGYSD RIIQITRGDS TITSQDVANA |
| ef173417-64 | SKFTDPVKDV LEKGIPTLQS PTVEACGYSD RIIQITRGDS TITSQDVANA |
| hrv-65 | SKFTDPVKDV LTKGIPTLQS PSVEACGYSD RIIQITRGNS TITSQDIANA |
| hrv-66 | SKFTDPVKDV LXKGIPTLQS PTVEACGYSD RIIQITRGDS TITSQDVANA |
| hrv-67 | SKFTDPVKDV LEKGIPTLQS PTVEACGYSD RIIQITRGDS TITSQDVANA |
| hrv-68 | SKFTDPVKDV LMKDIPTLQS PSVEACGYSD RIIQITRGNS TITSQDIANA |
| hrv-71 | SKFTDPVKDV LIKGVPTLQS PSVEACGYSD RIIQITRGNS TITSQDIANA |
| dq473492-73 | SKFTDPVKDV LEKGIPTLQS PTVEACGYSD RIIQITRGDS TITSQDVANA |
| dq473494-74 | SKFTDPVKDV LEKGIPTLQS PTVEACGYSD RIIQITRGDS TITSQDVANA |
| dq473510-75 | SKFTDPVKDV LEKGIPTLQS PTVEACGYSD RIIQITRGDS TITSQDVANA |
| dq473502-76 | SKFTDPVKDV LEKGIPTLQS PTVEACGYSD RIIQITRGDS TITSQDVANA |
| hrv-76 | SKFTDPVKDV LEKGIPTLQS PTVEACGYSD RIIQITRGDS TITSQDVANA |
| hrv-77 | SKFTDPVKDV LEKGIPTLQS PTVEACGYSD RIIQITRGDS TITSQDVANA |
| hrv-78 | SKFTDPVKDV LTKGVPTLQS PSVEACGYSD RIIQITRGDS TITSQDIANA |
| ef173418-78 | SKFTDPVKDV LTKGVPTLQS PSVEACGYSD RIIQITRGDS TITSQDIANA |
| hrv-80 | SKFTDPVKDV LTKGIPTLQS PSVEACGYSD RIIQITRGNS TITSQDIANA |
| hrv-81 | SKFTDPVKDV LEKGIPTLQS PSVEACGYSD RIIQITRGDS TITSQDVANA |
| hrv-81-f06 | SKFTDPVKDV LEKGIPTLQS PSVEACGYSD RIIQITRGDS TITSQDVANA |
| hrv-81-f07 | SKFTDPVKDV LEKGIPTLQS PSVEACGYSD RIIQITRGDS TITSQDVANA |
| hrv-82 | SKFTDPVKDV LEKGIPTLQS PTVEACGYSD RIIQITRGDS TITSQDVANA |
| dq473509-82 | SKFTDPVKDV LEKGIPTLQS PTVEACGYSD RIIQITRGDS TITSQDVANA |
| hrv-85 | SKFTDPVKDV LEKGIPTLQS PTVEACGYSD RIIQITRGDS TITSQDVANA |
| pico-85 | SKFTDPVKDV LEKGIPTLQS PTVEACGYSD RIIQITRGDS TITSQDVANA |
| dq473504-88 | SKFTDPVKDV LEKGIPTLQS PSVEACGYSD RLMQITRGDS TITSQDIANA |
| a10937-89 | SKFTDPVKDV LEKGIPTLQS PTVEACGYSD RLIQITRGDS TITSQDTANA |
| hrv-89 | SKFTDPVKDV LEKGIPTLQS PTVEACGYSD RLIQITRGDS TITSQDIANA |
| hrv-89-f08 | SKFTDPVKDV LEKGIPTLQS PTVEACGYSD RLIQITRGDS TITSQDIANA |
| hrv-89-f09 | SKFTDPVKDV LEKGIPTLQS PTVEACGYSD RLIQITRGDS TITSQDIANA |
| m16248-89 | SKFTDPVKDV LEKGIPTLQS PTVEACGYSD RLIQITRGDS TITSQDTANA |
| hrv-90 | SKFTDPVKDV LEKGIPTLQS PSVEACGYSD RIIQITRGDS TITSQDVANA |
| hrv-94 | SKFTDPVKDV LEKGIPTLQS PTVEACGYSD RIIQITRGDS TITSQDVANA |
| ef173419-94 | SKFTDPVKDV LEKGIPTLQS PTVEACGYSD RIIQITRGDS TITSQDVANA |
| hrv-95 | SKFTDPVKDV LTKGIPTLQS PTVEACGYSD RIIQITRGDT TITSQDIANA |
| hrv-96 | SKFTDPVKDV LEKGIPTLQS PTVEACGYSD RIIQITRGDS TITSQDVANA |
| hrv-98 | SKFTDPVKDV LEKGIPTLQS PTVEACGYSD RIIQITRGDS TITSQDVANA |
| hrv-100 | SKFTDPVKDV LEKGIPTLQS PTVEACGYSD RIIQITRGDS TITSQDVANA |
| ef186077-qpm | SKFTQPVADI LTN..PALMS PSIEACGFSD RLKQITIGNS TITTQDAVNT |
| ef077279-nat001 | SKFTQPVADV LTN..PALMS PSVEACGFSD RLKQITIGNS TITTQDAVNT |
| ny1078 | SKFTQPVADL LTN..PALMS PSVEACGYSD RLKQITIGSS TITTQDSVNT |
| ef582385-c024 | SKFTQPLAEA LTN..PALMS PTVEACGMSD RLKQITIGNS TITTQDTLNS |
| ef077280-nat045 | SKFTQPIADV LTN..PALMS PTVEACGFSD RLKQITIGNS TITTQDSLNT |
| ef582387-c026 | SKFTQPVADI LSN..PALMS PSIEACGFSD RLKQITIGNS TITTQDAVNT |
| ef582386-c025 | EKFTKPLADV MTN..PALMS PSIEACGFSD RLKQITIGSS TITTQDTLNT |
| dq473485-03 | SKFTEPVKDL MLKGAPALNS PNVEACGYSD RVQQITLGNS TITTQEAANA |
| ef173422-03 | SKFTEPVKDL MLKGAPALNS PNVEACGYSD RVQQITMGNS TITTQEAANA |
| dq473490-04 | SKFTEPVKDL MLKGAPALNS PNIEACGYSD RVEQITLGNS TITTQEAANS |
| hrv-05 | SKFTEPVKDI MLKGAPALNS PNIEACGYSD RVEQITLGNS TITTQEAANS |
| dq473486-06 | SKFTEPVKDL MLKGAPALNS PNVEACGYSD RVQQITLGNS TITTQEAANA |
| l05355-14 | SKFTEPVKDL MLKGAPALNS PNVEACGYSD RVQQITLGNS TITTQEAANA |
| k02121-14 | SKFTEPVKDL MLKGAPALNS PNVEACGYSD RVQQITLGNS TITTQEAANA |
| ef173420-17 | SKFTEPVKDI MLKGAPALNS PNVEACGYSD RVQQITLGNS TITTQEAANA |
| hrv-26 | SKFTEPVKDL MLKGAPALNS PNIEACGYSD RVEQITIGNS TITTQEAANT |
| hrv-27 | SKFTEPVKDI MLKGAPALNS PNIEACGYSD RVEQITIGNS TITTQEAANA |
| ef173421-27 | SKFTEPVKDI MLKGAPALNS PNIEACGYSD RVEQITIGNS TITTQEAANA |
| dq473487-35 | SKSTEPVKDL MLKGAPALNS PNVEACGYSD RVQQITLGNS TITTQEAANA |
| hrv-35 | SKFTEPVKDL MLKGAPALNS PNVEACGYSD RVQQITLGNS TITTQEAANA |
| ef173423-37 | SKFTEPVKDL MLKGAPALNS PNVEACGYSD RVQQITLGNS TITTQEAANA |
| hrv-42 | SKFTEPVKDI MLKGAPALNS PNIEACGYSD RVEQITLGNS TITTQEAANS |
| dq473488-48 | SKFTEPVKDI MIKGAPALNS PNVEACGYSD RVQQITLGNS TITTQEAANA |
| hrv-52 | SKFTEPVKDI MLKGAPALNS PNVEACGYSD RVQQITLGNS TITTQEAANA |
| hrv-52-f10 | SKFTEPVKDI MLKGAPALNS PNVEACGYSD RVQQITLGNS TITTQEAANA |
| ef173424-52 | SKFTEPVKDI MLKGAPALNS PNVEACGYSD RVQQITLGNS TITTQEAANA |
| hrv-69 | SKFTEPVKDI MLKGAPALNS PNVEACGYSD RVQQITLGNS TITTQEAANA |
| dq473489-70 | SKFTEPVKDI MLKGAPALNS PNVEACGYSD RVQQITLGNS TITTQEAANA |
| hrv-72 | SKFTEPVKDL MLKGAPALNS PNVEACGYSD RVQQITLGNS TITTQEAANA |
| hrv-79 | SKFTEPVKDL MLKGAPALNS PNVEACGYSD RVQQITLGNS TITTQEAANA |
| hrv-83 | SRFTEPVKDL MLKGAPALNS PNVEACGYSD RVQQITLGNS TITTQEAANA |
| hrv-84 | SKFTEPVKDL MLKGAPALNS PNIEACGYSD RVEQITIGNS TITTQEAANA |
| hrv-86 | SKFTEPVKDL MLKGAPALNS PNVEACGYSD RVQQITLGNS TITTQEAANA |
| hrv-91 | SKFTEPVKDI MLKGAPALNS PNVEACGYSD RVQQITLGNS TITTQEAANA |
| hrv-92 | SKFTEPVKDL MLKGAPALNS PNVEACGYSD RVQQITLGNS TITTQEAANA |
| ef173425-93 | SKFTEPVKDI MLKGAPALNS PNIEACGYSD RVEQITIGNS TITTQEAANA |
| hrv-97 | SKFTEPVKDI MLKGAPALNS PNVEACGYSD RVEQITIGNS TITTQEAANA |
| hrv-99 | SKFTEPVKDI MLKGAPALNS PNIEACGYSD RVEQITLGNS TITTQEAANT |
| | 101 150 |
| annotation | .......... .......... ....HHHZHH ..BBBBBBBB .....BBCBB |
| af499637-cva13 | VVAYGVWPSY LSDKDANPVD QPTEPDVSAC RFYTLDTVEW DKESKGWWWK |
| af546702-cva21 | IVAYGEWPTY INDSEANPVD APTEPDVSSN RFYTLESVSW KTTSRGWWWK |
| v01149-pv1m | VVAYGRWPEY LRDSEANPVD QPTEPDVAAC RFYTLDTVSW TKESRGWWWK |
| d00239-01 | VVGYGVWPHY LTPQDATAID KPTQPDTSSN RFYTLESKHW NGDSKGWWWK |
| pico-01 | VVGYGVWPHY LTPQDATAID KPTQPDTSSN RFYTLESKHW NGSSKGWWWK |
| hrv-01 | VVGYGVWPHY LTPQDATAID KPTQPDTSSN RFYTLESKHW NGSSKGWWWK |
| x02316-02 | IVAYGVWPHY LSSKDASAID KPSQPDTSSN RFYTLRSVTW SSSSKGWWWK |
| hrv-07 | VVGYGVWPSY LTPDDATAID KPTQPDTSSN RFYTLDSRTW TSASLGWWWK |
| dq473503-07 | VVGYGVWPSY LTPDDATAID KPTQPDTSSN RFYTLDSRTW TSASLGWWWK |
| hrv-08 | VVAYGVWPTY LNSKDATAID KPTQPDTSTN RFYTLESREW RSDSKGWWWK |
| pico-09 | VVGYGVWPHY LTPQDATAID KPSHPDTSSN RFYTLESKTW SGDSKGWWWK |
| hrv-09 | IVGYGVWPHY LTPQDATAIX KPSHPDTSSN RFYTLESKTW SSDSKGWWWK |
| hrv-09-f01 | VVGYGVWPHY LTPQDATAID KPSHPDTSSN RFYTLESKTW SNESKGWWWK |
| hrv-09-f02 | VVGYGVWPHY LTPQDATAID KPSHPDTSSN RFYTLESKTW SNESKGWWWK |
| dq473498-10 | VVGYGVWPHY LSATDATAID KPTQPDTSSN RFYTLESKVW TSTSQGWWWK |
| hrv-10 | VVGYGVWPHY LSATDATAID KPTQPDTSSN RFYTLESKVW TSTSQGWWWK |
| ef173414-11 | VVGYGVWPHY LTSQDATAID KPSRPDTSSN RFYTLESKHW TSTSKGWWWK |
| ef173415-12 | VVAYGVWPHY LSAEDANAID KPTRPDTSSN RFYTLESKQW MENSKGWWWK |
| hrv-13 | VVGYGVWPHY LTPQDATAID KPTRPDTSSN RFYTLKSQLW TAESKGWWWK |
| hrv-13-f03 | VVGYGVWPHY LTPQDATAID KPTRPDTSSN RFYTLESQLW TAESKGWWWK |
| dq473493-15 | VVGYGVWPHY LTPEDATAID KPSHPDTSSN RFYTLDSKLW SGDSKGWWWK |
| l24917-16 | VVGYGVWPHY LTPQDATAID KPTQPDTSSN RFYTLDSKMW NSTSKGWWWK |
| hrv-18 | VVGYGVWPHY LTPQDATAID KPSRPDTSSN RFYTLESKTW DSSSKGWWWK |
| hrv-19 | VVGYGVWPHY LTPEDATAID KPSQPDTSTN RFYTLESKVW DSESKGWWWK |
| hrv-20 | VVAYGVWPQY LTPDHASAID KPTHPDISSN RFYTLESKEW TRDSKGWWWK |
| hrv-21 | VVGYGVWPHY LTPQDATAID KPSRPDTSSN RFYTLESKMW TSDSKGWWWK |
| hrv-22 | VVGYGVWPHY LTPEDATAID KPTQPDTSSN RFYTLESKIW ASNSKGWWWK |
| dq473497-23 | VVAYGVWPHY LSSEDATAID KPSRPDTSSN RFYTLKSITW SRSSKGWWWK |
| hrv-24 | VVAYGVWPHY LTPQDATAID KPSRPDTSSN RFYTLESKTW TGTSKGWWWK |
| ef173416-24 | VVAYGVWPHY LTPQDATAID KPSRPDTSSN RFYTLESKTW TGTSKGWWWK |
| hrv-25 | VIGYGIWPHY LSAEDATAID KPTQPDTSSN RFYTLESKTW HADSKGWWWK |
| dq473508-28 | VVAYGVWPEY LPSQDASAID KPTHPDTSSN RFYTLESKNW TETSKGWWWK |
| hrv-29 | VIGYGVWPHY LSAEDATAID KPTQPDTSSN RFYTLESKTW NRQSKGWWWK |
| dq473512-30 | VVAYGVWPHY LSSKDATAID KPSRLDTSSN RFYTLKSIIW SGASKGWWWK |
| hrv-30 | VVAYGVWPHY LSSKDATAID KPSRPDTSSN RFYTLKSIIW SGASKGWWWK |
| hrv-31 | VVGYGIWPHY LSAKDATAID KPTQPDTSSN RFYTLESKIW TRDSKGWWWK |
| hrv-32 | VVAYGVWPHY LTPQDATAID KPSHPDTSSN RFYTLESKNW DSESKGWWWK |
| hrv-33 | VVGYGVWPHY LTPQDATAID KPSRPDTSSN RFYTLASKEW DFNSKGWWWK |
| hrv-34 | VVGYGVWPHY LTPQDATAID KPSRPDTSSN RFYTLESKMW DSSSKGWWWK |
| dq473501-34 | VVGYGVWPHY LTPQDATAID KPSRPDTSSN RFYTLESKMW DSSSKGWWWK |
| dq473505-36 | VVGYGVWPSY LTPDDATAID KPTQPDTSSN RFYTLESRSW TSSSSGWWWK |
| hrv-38 | VVGYGVWPHY LTSRDATAID KPSQPDTSSN RFYTLESKTW TSDSKGWWWK |
| dq473495-38 | VVGYGVWPHY LTSRDATAID KPSQPDTSSN RFYTLESKTW TSDSKGWWWK |
| ay751783-39 | VVGYGVWPHY LTADDASAID KPTQPDTSSN RFYTLESKVW KRDSKGWWWK |
| hrv-40 | VVGYGVWPHY LTPQDATAID KPSQPDTSSN RFYTLESKEW TNSSQGWWWK |
| dq473491-41 | VVGYGVWPHY LTSQDATAID KPTRPDTSSN RFYTLESQLW TNTSKGWWWK |
| hrv-43 | VVAYGVWPHY LTPQDATAID KPSQPETSSD RFYTLESRSW DSTSKGWWWK |
| dq473499-44 | VIGYGVWPHY LSAEDATAID KPTQPDTSSN RFYTLESKTW DRQSKGWWWK |
| hrv-45 | VVGYGVWPHY LDSKDASAID KPTQPDTSAN RFYTLESKEW TPDSKGWWWK |
| dq473506-46 | VVGYGVWPEY LTDDDASAID KPTHPDTSSN RFYTLESKHW ENNSKGWWWK |
| hrv-47 | VVGYGVWPHY LSAKDATAID KPTQPDTSSN RFYTLESKIW KPDSKGWWWK |
| dq473496-49 | VVAYGVWPHY LSSKDASAID KPSRPDTSSN RFYTLKSVTW TNSSKGWWWK |
| hrv-49-f04 | VVAYGVWPHY LSSKDASAID KPSRPDTSSN RFYTLKSVTW SNSSKGWWWK |
| hrv-50 | VVGYGVWPHY LSSQDATAID KPSRPDTSSN RFYTLESKSW DSMSKGWWWK |
| hrv-51 | VVAYGVWPHY LSDTDANAID KPSHPDTSSD RFYTLDSKLW SNESKGWWWK |
| dq473507-53 | VVAYGVWPEY LSAQDASAID KPSHPDTSSN RFYTLESKNW TNTSKGWWWK |
| hrv-54 | VVGYGVWPHY LTAQDATAID KPTQPDTSSN RFYTLESKLW DETSKGWWWK |
| hrv-54-f05 | VVGYGVWPHY LTAQDATAID KPTQPDTSSN RFYTLDSKLW DETSKGWWWK |
| dq473511-55 | VVGYGVWPHY LTPQDATALD KPSRPDTSSN RFYTLESKIW NGTSKGWWWK |
| hrv-56 | VVGYGVWPHY LTPQDATAID KPTQPDTSSN RFYTLESKVW TQTSKGWWWK |
| hrv-57 | VVGYGVWPHY LTPQDATAID KPSRPDTSSN RFYTLESKMW SSTSKGWWWK |
| hrv-58 | VVGYGVWPSY LTPDDATAID KPTQPDTSSN RFYTLESRNW TNSSTGWWWK |
| dq473500-59 | VVGYGVWPHY LTPQDATAID KPTQPDTSSN RFYTLESKTW VETSKGWWWK |
| hrv-60 | VVGYGVWPHY LTAQDATAID KPSQPDTSSN RFYTLESKLW TNESKGWWWK |
| hrv-61 | VVGYGVWPHY LTPQDATAID KPSKPDTSSN RFYTLESQTW TNESKGWWWK |
| hrv-62 | VIGYGIWPHY LSAEDATAID KPTQPDTSSN RFYTLESKIW HTNSKGWWWK |
| hrv-63 | VVGYGVWPQY LSSQDATAID KPTQPDTSSN RFYTLESKVW TRTSKGWWWK |
| hrv-64 | VVGYGVWPHY LTPQDATAID KPTQPDTSSN RFYTLESKTW ASNSKGWWWK |
| ef173417-64 | VVGYGVWPHY LTPQDATAID KPTQPDTSSN RFYTLESKTW ASNSKGWWWK |
| hrv-65 | VVGYGVWPQY LSDADANAID KPTHPDTSSN RFYTLDSKLW TSTSKGWWWK |
| hrv-66 | VVGYGVWPHY LSGADATAID KPSRPDTSSN RFYTLESKVW TPTSQGWWWK |
| hrv-67 | VVGYGVWPHY LTPQDATAID KPSHPDTSSN RFYTLESKTW SADSKGWWWK |
| hrv-68 | VVAYGVWPQY LSPDDASAID KPTHPDVSSN RFYTLDSKEW TNESKGWWWK |
| hrv-71 | VVAYGVWPQY LSDADANAID KPSHPDTSSN RFYTLDSKLW ENGSKGWWWK |
| dq473492-73 | VVAYGVWPHY LTPQDATAID KPTRPDTSSN RFYTLESQMW SPESKGWWWK |
| dq473494-74 | VVGYGVWPHY LTPEDATAID KPSHPDTSAN RFYTLESKLW NGESKGWWWK |
| dq473510-75 | VVAYGVWPHY LTPQDATAID KPSQPETSSN RFYTLESKTW DSSSKGWWWK |
| dq473502-76 | VVGYGVWPHY LTSQDATAID KPSRPDTSSN RFYTLESKEW SANSKGWWWK |
| hrv-76 | VVGYGVWPHY LTSQDATAID KPSRPDTSSN RFYTLESKEW SANSKGWWWK |
| hrv-77 | VVGYGVWPHY LSAADATAID KPTQPDTSSN RFYTLESKVW SSTSQGWWWK |
| hrv-78 | VVAYGVWPSY LTAKDASAID KPTQPDTSSN RFYTLESKNW QSDSKGWWWK |
| ef173418-78 | VVAYGVWPSY LTAKDASAID KPTQPDTSSN RFYTLESKNW QSDSKGWWWK |
| hrv-80 | VVAYGVWPEY LSSDDASAID KPTHPDTSSN RFYTLESKQW DTNSKGWWWK |
| hrv-81 | VVGYGVWPHY LNSRDAVAID KPTQPDTSSN RFYTLDSKMW DNNSKGWWWK |
| hrv-81-f06 | VVGYGVWPHY LNSRDAVAID KPTQPDTSSN RFYTLDSKMW DSNSKGWWWK |
| hrv-81-f07 | VVGYGVWPHY LNSRDAVAID KPTQPDTSSN RFYTLDSKMW DSNSKGWWWK |
| hrv-82 | VVGYGIWPHY LSPEDATAID KPTRPDTSSN RFYTLESKIW TSDSKGWWWK |
| dq473509-82 | VVGYGIWPHY LSPEDATAID KPTRPDTSSN RFYTLESKIW TRDSKGWWWK |
| hrv-85 | VVGYGVWPHY LTPQDATAID KPSQPDTSSN RFYTLESKEW TNSSQGWWWK |
| pico-85 | VVGYGVWPHY LTPQDATAID KPSQPDTSSN RFYTLESKEW TNSSQGWWWK |
| dq473504-88 | VVGYGVWPSY LTPDDATAID KPTQPDTSSN RFYTLESRTW TTASTGWWWK |
| a10937-89 | VVAYGVWPSY LTPDDATAID KPTQPDTSSN RFYTLDSRSW TSASSGWWWK |
| hrv-89 | VVAYGVWPSY LTPDDATAID KPTQPDTSSN RFYTLDSRSW TSASSGWWWK |
| hrv-89-f08 | VVAYGVWPSY LTPDDATAID KPTQPDTSSN RFYTLDSRSW TSASSGWWWK |
| hrv-89-f09 | VVAYGVWPSY LTPDDATAID KPTQPDTSSN RFYTLDSRSW TSASSGWWWK |
| m16248-89 | VVAYGVWPSY LTPDDATAID KPTQPDTSSN RFYTLDSRSW TSASSGWWWK |
| hrv-90 | VVAYGVWPHY LTPQDATAID KPSRPDTSSN RFYTLESKTW TGSSKGWWWK |
| hrv-94 | VVGYGVWPHY LTPQDATAID KPTQPDTSSN RFYTLESKIW TTDSKGWWWK |
| ef173419-94 | VVGYGVWPHY LTPQDATAID KPTQPDTSSN RFYTLESKIW TTDSKGWWWK |
| hrv-95 | VVAYGVWPTY LNSKDATAID KPTQPDTSTN RFYTLESREW RSDSKGWWWK |
| hrv-96 | VVGYGVWPHY LTPQDATAID KPSRPDTSSN RFYTLESQTW SGDSKGWWWK |
| hrv-98 | VVGYGVWPHY LTAQDATAID KPTQPDTSSN RFYTLESKLW HETSKGWWWK |
| hrv-100 | VVGYGVWPHY LSAADATAID KPTQPDTSSN RFYTLESKIW TGTSQGWWWK |
| ef186077-qpm | IVAYGEWPSY LSDIDATSVD KPTHPETSSD RFYTLKSVTW EVGSSGWWWK |
| ef077279-nat001 | IVAYGEWPSY LSDLDATSVD KPTHPETSSD RFYTLKSVEW QSSSEGWWWK |
| ny1078 | IVAYGEWPSY LSDLDASSVD KPTHPETSAD RFYTLDSVQW GGSSKGWWWK |
| ef582385-c024 | ILAYGEWPKY LSDLDASSVD KPTHPETSSD RFYTLTSVDW TTTSKGWWWK |
| ef077280-nat045 | IVAYGEWPEY LSDLDATSVD KPTHPETSSD RFYTLESVMW HGSSRGWWWK |
| ef582387-c026 | IVAYGEWPSY LSDMDATSVD KPTHPETSSD RFYTLNSVTW QGGSLGWWWK |
| ef582386-c025 | VVAYGEWPEY LKDTDASAVD KPTHPETSTD RFYTLTSVNG MASSKGWWWK |
| dq473485-03 | IVCYAEWPEY LSDNDASDVN KTSKPDISVC RFYTLDSKTW KATSKGWCWK |
| ef173422-03 | IVCYAEWPEY LSDNDASDVN KTSKPDISVC RFYTLDSKTW KATSKGWCWK |
| dq473490-04 | IVAYGEWPSF LDDSDASDVN KTTKPDISAC RFYTLDSKTW TNLSKGWCWK |
| hrv-05 | IVAYGEWPSF LSDVDASDVN KTTKPDTSAC RFYTLDSKMW TQGSKGWCWK |
| dq473486-06 | VVCYAEWPEY LPDGDASDVN KTSKPDTSVC RFYTLESKTW QNSSKGWCWK |
| l05355-14 | VVCYAEWPEY LPDVDASDVN KTSKPDTSVC RFYTLDSKTW TTGSKGWCWK |
| k02121-14 | VVCYAEWPEY LPDVDASDVN KTSKPDTSVC RFYTLDSKTW TTGSKGWCWK |
| ef173420-17 | VVAYAEWPSY LADIDASDVN KTSQPDTSVC RFYTLESKTW TRDSKGWCWK |
| hrv-26 | VVAYGEWPSF LSDVDASDVN KTTKPDTSAC RFYTLQSKMW NPDSKGWCWK |
| hrv-27 | IVAYAEWPSF LKDDDASDVN KPTRPDTSAC RFYTLASKTW SRESKGWCWK |
| ef173421-27 | IVAYAEWPSF LKDDDASDVN KPTRPDTSAC RFYTLASKTW SRESKGWCWK |
| dq473487-35 | VVCYAEWPEY LSDDDASDVN KTSKPDTSVC RFYTLDSKTW QQDSKGWCWK |
| hrv-35 | VVCYAEWPEY LSDDDASDVN KTSKPDTSVC RFYTLDSKTW QQDSKGWCWK |
| ef173423-37 | VVCYAEWPEY LPDKDASDVN KTSKPDTSVC RFYTLESKTW KNSSKGWCWK |
| hrv-42 | IVAYGEWPSF LSDVDASDVN KTTKPDTSAC RFYTLDSKTW SQSSKGWCWK |
| dq473488-48 | VVAYAEWPSY LSDMDASDVN KTSQSDTSVC RFYTLESKLW KTTSKGWCWK |
| hrv-52 | VVAYAEWPSY LSDSDASDVN KTSQPDTSVC RFYTLDSKTW SANSKGWCWK |
| hrv-52-f10 | VVAYAEWPSY LSDSDASDVN KTSQPDTSVC RFYTLDSKTW SANSKGWCWK |
| ef173424-52 | VVAYAEWPSY LSDSDASDVN KTSQPDTSVC RFYTLDSKTW SANSKGWCWK |
| hrv-69 | VVAYAEWPSY LTDTDASDVN KTSQPDTSVC RFYTLESKTW TNLSKGWCWK |
| dq473489-70 | VVAYAEWPSY LADNDASDVN KTSQPDTSVC RFYTLESKTW TNSSKGWCWK |
| hrv-72 | VVCYAEWPEY LPDRDASDVN KTSKPDTSVC RFYTLDSKMW QKNSKGWCWK |
| hrv-79 | VVCYAEWPEY LPDSDASDVN KTSKPDTSVC RFFTLDSKEW TQNSKGWCWK |
| hrv-83 | VVCYAEWPEY LPDKDASDVN KTSKPDTSVC RFYTLDSKDW SANSKGWCWK |
| hrv-84 | IVGYGEWPSF LDDKDASDVN KPTRPDTSAC RFYTLASKTW SQSSKGWCWK |
| hrv-86 | VVCYAEWPEY LPDKDASDVN KTSKPDTSVC RFYTLDSKTW NNTSKGWCWK |
| hrv-91 | VVAYAEWPSY LADSDASDVN KTSKPDTSVC RFYTLDSKTW TRESKGWCWK |
| hrv-92 | VVCYAEWPEY LSDNDASDVN KTSKPDTSVC RFYTLDSKDW SPSSKGWCWK |
| ef173425-93 | IVAYAEWPSF LEDTDASDVN KPTRPDTSAC RFYTLASKTW SPASRGWCWK |
| hrv-97 | VVAYAEWPSF LKDVDASDVN KPTRPDTSAC RFYTLASKTW NPTSKGWCWK |
| hrv-99 | VVAYGEWPSF LSDNDASDVN KTTKPDTSAC RFYTLDSKLW TQDSKGWCWK |
| | 151 200 |
| annotation | BHHHHHHHHA HHHHHHHHBB BBBDBBBBBB .......BBB EBBBBB.... |
| af499637-cva13 | LPDALKDMGL FGQNMYYHYL GRSGYTVHVQ CNASKFHQGT LGVFAVPEYC |
| af546702-cva21 | LPDCLKDMGM FGQNMYYHYL GRSGYTIHVQ CNASKFHQGA LGVFLIPEFV |
| v01149-pv1m | LPDALRDMGL FGQNMYYHYL GRSGYTVHVQ CNASKFHQGA LGVFAVPEMC |
| d00239-01 | LPDALKEMGI FGENMYYHFL GRSGYTVHVQ CNASKFHQGT LLVAMIPEHQ |
| pico-01 | LPDALKDMGI FGENMYYHFL GRSGYTVHVQ CNASKFHQGT LLVAMIPEHQ |
| hrv-01 | LPDALKDMGI FGENMYYHFL GRSGYTVHVQ CNASKFHQGT LLVAMIPEHQ |
| x02316-02 | LPDALKDMGI FGENMFYHYL GRSGYTIHVQ CNASKFHQGT LIVALIPEHQ |
| hrv-07 | LPDALKNMGI FGENMFYHFL GRSGYTIHVQ CNSSKFHQGL LIVAAIPEHQ |
| dq473503-07 | LPDALKNMGI FGENMFYHFL GRSGYTIHVQ CNSSKFHQGL LIVAAIPEHQ |
| hrv-08 | LPDALKDMGV FGENMFYHSL GRAGYMIHVQ CNASKFHSGT LLVVAIPEHQ |
| pico-09 | LPDALKDMGI FGQNMYYHFL GRSGYTVHVQ CNSSKFHQGT LIVAMIPEDQ |
| hrv-09 | LPDALKDMGI FGQNMYYHFL GRSGYTVHVQ CNSSKFHQGT LIVAMIPEHQ |
| hrv-09-f01 | LPDALKDMGI FGQNMYYHFL GRSGYTVHVQ CNSSKFHQGT LIVAMIPEHQ |
| hrv-09-f02 | LPDALKDMGI FGQNMYYHFL GRSGYTVHVQ CNSSKFHQGT LIVAMIPEHQ |
| dq473498-10 | LPDALKDMGI FGENMFYHYL GRSGYTVHVQ CNASKFHQGT LLVVMIPEHQ |
| hrv-10 | LPDALKDMGI FGENMFYHYL GRSGYTVHVQ CNASKFHQGT LLVVMIPEHQ |
| ef173414-11 | LPDALRDMGI FGENMFYHFL GRSGYTVHVQ CNASKFHQGT LIVAMIPEHQ |
| ef173415-12 | LPDALKDMGI FGENMFYHFL GRSGYTIHVQ CNASKFHQGT LMVVAIPEHQ |
| hrv-13 | LPDALKDMGI FGENMFYHFL GRCGYTVHVQ CNASKFHQGT LLIAMIPEHQ |
| hrv-13-f03 | LPDALKDMGI FGENMFYHFL GRSGYTVHVQ CNASKFHQGT LLIAMIPEHQ |
| dq473493-15 | LPDALRDMGV FGQNMYYHFL GRSGYTVHVQ CNSSKFHQGT LIVAMIPEHQ |
| l24917-16 | LPDALKDMGI FGENMFYHFL GRSGYTVHVQ CNASKFHQGT LLVVMIPEHQ |
| hrv-18 | LPDALKDMGI FGENMYYHFL GRSGYTVHVQ CNASKFHQGT LIVAMIPEHQ |
| hrv-19 | LPDALKDMGV FGQNMYYHFL GRSGYTIHVQ CNASKFHQGT LIVAAIPEHQ |
| hrv-20 | LPDALKNMGI FGENLFYHFL GRAGYTVHVQ CNASKFHQGT LIVAAIPEHQ |
| hrv-21 | LPDALKNMGI FGENMFYHFL GRSGYTVHVQ CNASKFHQGT LIVVMIPEHQ |
| hrv-22 | LPDALKDMGI FGQNMYYHFL GRSGYTIHVQ CNASKFHQGT LIVAAIPEHQ |
| dq473497-23 | LPDALRDMGI FGENMFYHYL GRSGYTVHVQ CNATKFHQGT LVVAMIPEHQ |
| hrv-24 | LPDALKEMGI FGENMFYHFL GRSGYTVHVQ CNASKFHQGT LIVAMIPEHQ |
| ef173416-24 | LPDALKEMGI FGENMFYHFL GRSGYTVHVQ CNASKFHQGT LIVAMIPEHQ |
| hrv-25 | LPDALKDMGI FGENMYYHYL GRSGYTVHVQ CNASKFHQGT LLVVMIPEHQ |
| dq473508-28 | LPDALKNMGI FGENLFYHFL GRAGYTVHVQ CNASKFHQGT LIVAAIPEHQ |
| hrv-29 | LPDALKDMGI FGENMYYHYL GRSGYTVHVQ CNASKFHQGT LLVVMIPEHQ |
| dq473512-30 | LPDALRDMGI FGENMFYHYL GRSGYTVHVQ CNATKFHQGT LIVAMIPEHQ |
| hrv-30 | LPDALRDMGI FGENMFYHYL GRSGYTVHVQ CNATKFHQGT LIVAMIPEHQ |
| hrv-31 | LPDALKDMGI FGENMYYHYL GRSGYTVHVQ CNASKFHQGT LLIMMIPEHQ |
| hrv-32 | LPDALKDMGV FGQNMYYHFL GRSGYTVHVQ CNSSKFHQGT LIVAMIPEHQ |
| hrv-33 | LPDALKDMGI FGENMFYHFL GRSGYTVHVQ CNASKFHQGT LIVAMIPEHQ |
| hrv-34 | LPDALKDMGI FGENMYYHFL GRSGYTVHVQ CNASKFHQGT LIVAMIPEHQ |
| dq473501-34 | LPDALKDMGI FGENMYYHFL GRSGYTVHVQ CNASKFHQGT LIVAMIPEHQ |
| dq473505-36 | LPDALKNMGI FGENMFYHFL GRSGYTIHVQ CNSSKFHQGL LIVAAIPEHQ |
| hrv-38 | LPDALKEMGV FGQNMYYHFL GRSGYTVHVQ CNSSKFHQGT LIVAMIPEHQ |
| dq473495-38 | LPDALKEMGV FGQNMYYHFL GRSGYTVHVQ CNSSKFHQGT LIVAMIPEHQ |
| ay751783-39 | LPDALKDMGI FGENMYYHFL GRSGYTVHVQ CNASKFHQGT LLIAMVPEHQ |
| hrv-40 | LPDALKDMGI FGENMFYHFL GRSGYTVHVQ CNASKFHQGT LLIVMIPEHQ |
| dq473491-41 | LPDALKDMGI FGENMFYHFL GRSGYTVHVQ CNASKFHQGT LLIATIPEHQ |
| hrv-43 | LPDALKDMGI FGQNMYYHFL GRSGYTVHVQ CNASKFHQGT LIVAMIPEHQ |
| dq473499-44 | LPDALKDMGI FGENMYYHYL GRSGYTVHVQ CNASKFHQGT LLVVMILEHQ |
| hrv-45 | LPDALKDMGV FGENMFYHAL GRSGYLIHVQ CNASKFHSGT LLVVAIPEHQ |
| dq473506-46 | LPDALKSMGI FGENMFYHHL GRAGYTIHVQ CNASKFHQGT LIVVAIPEHQ |
| hrv-47 | LPDALKDMGI FGENMYYHYL GRSGYTVHVQ CNASKFHQGT LLIMMIPEHQ |
| dq473496-49 | LPDALREMGI FGENMFYHYL GRSGYTIHVQ CNASKFHQGT LIVALIPEHQ |
| hrv-49-f04 | LPDALKEMGI FGENMFYHYL GRSGYTIHVQ CNASKFHQGT LIVALIPEHQ |
| hrv-50 | LPDALKEMGI FGENMYYHFL GRSGYTVHVQ CNASKFHQGT LIVAMIPEHQ |
| hrv-51 | LPDALKDMGI FGENMFYHFL GRTGYTIHVQ CNASKFHQGT LVVAAIPEHQ |
| dq473507-53 | LPDALKNMGI FGENLFYHFL GRAGYTVHVQ CNASKFHQGT LIVAAIPEHQ |
| hrv-54 | LPDALKDMGI FGENMFYHFL GRSGYTVHVQ CNASKFHQGT LLVAMVPEHQ |
| hrv-54-f05 | LPDALKDMGI FGENMFYHFL GRSGYTVHVQ CNASKFHQGT LLIAMVPEHQ |
| dq473511-55 | LPDALKNMGI FGENMFYHFL GRSGYTVHVQ CNASKFHQGT LIVAMIPEHQ |
| hrv-56 | LPDALKDMGI FGENMFYHFL GRSGYTVHVQ CNASKFHQGT LLVAMVPEHQ |
| hrv-57 | LPDALKNMGI FGENMFYHFL GRSGYTVHVQ CNASKFHQGT LVVAMIPEHQ |
| hrv-58 | LPDALKGMGI FGENMFYHFL GRSGYTIHVQ CNSSKFHQGL LIVAAIPEHQ |
| dq473500-59 | LPDALKDMGI FGENMFYHFL GRSGYTVHVQ CNASKFHQGT LLVAMVPEHQ |
| hrv-60 | LPDALKDMGV FGQNMYYHFL GRSGYTVHVQ CNSSKFHQGT LIVAMIPEHQ |
| hrv-61 | LPDALKDMGI FGENMFYHFL GRSGYTVHVQ CNASKFHQGT LLVAMIPEHQ |
| hrv-62 | LPDALKDMGI FGENMYYHYL GRSGYTVHVQ CNASKFHQGT LLVVMIPEHQ |
| hrv-63 | LPDALKDMGV FGENMFYHFL GRSGYTVHVQ CNASKFHQGT LLVAMVPEHQ |
| hrv-64 | LPDALKDMGI FGQNMYYHFL GRAGYTIHVQ CNASKFHQGT LIVAAIPEHQ |
| ef173417-64 | LPDALKDMGI FGQNMYYHFL GRAGYTIHVQ CNASKFHQGT LIVAAIPEHQ |
| hrv-65 | LPDALKNMGI FGENMFYHFL GRAGYTVHVQ CNASKFHQGT LVIAAIPEHQ |
| hrv-66 | LPDALKDMGI FGENMFYHYL GRSGYTVHVQ CNASKFHQGT LLVVMIPEHQ |
| hrv-67 | LPDALKDMGV FGQNMYYHFL GRSGYTVHVQ CNSSKFHQGT LIVAMIPEHQ |
| hrv-68 | LPDALKNMGI FGENLFYHFL GRAGYTVHVQ CNASKFHQGT LVVAAIPEHQ |
| hrv-71 | LPDALKNMGI FGENMFYHFL GRAGYTVHVQ CNASKFHQGT LVVAAIPEHQ |
| dq473492-73 | LPDALKDMGI FGENMFYHFL GRSGYTVHVQ CNASKFHQGT LLVAMIPEHQ |
| dq473494-74 | LPDALRDMGV FGQNMYYHFL GRNGYTVHVQ CNSSKFHQGT LIVAMIPEHQ |
| dq473510-75 | LPDALKDMGI FGQNMYYHFL GRSGYTVHVQ CNASKFHQGT LIVAMIPEHQ |
| dq473502-76 | LPDALKDMGI FGENMFYHFL GRSGYTVHVQ CNASKFHQGT LIVAMIPEHQ |
| hrv-76 | LPDALKDMGI FGENMFYHFL GRSGYTVHVQ CNASKFHQGT LIVAMIPEHQ |
| hrv-77 | LPDALKDMGI FGENMYYHYL GRSGYTVHVQ CNASKFHQGT LLVVMIPEHQ |
| hrv-78 | LPDALKDMGI FGENMFYHFL GRSGYTVHVQ CNASKFHQGT LLVVAIPEHQ |
| ef173418-78 | LPDALKDMGI FGENMFYHFL GRSGYTVHVQ CNASKFHQGT LLVVAIPEHQ |
| hrv-80 | LPDALKSMGI FGENMFYHHL GRAGYTIHVQ CNASKFHQGT LIVVAIPEHQ |
| hrv-81 | LPDALKDMGI FGENMFYHFL GRSGYTVHVQ CNASKFHQGT LLVTMIPEHQ |
| hrv-81-f06 | LPDALKDMGI FGENMFYHFL GRSGYTVHVQ CNASKFHQGT LLVTMIPEHQ |
| hrv-81-f07 | LPDALKDMGI FGENMFYHFL GRSGYTVHVQ CNASKFHQGT LLVTMIPEHQ |
| hrv-82 | LPDALKDMGV FGQNMYYHFL GRSGYTIHVQ CNASKFHQGT LIVAAIPEHQ |
| dq473509-82 | LPDALKEMGV FGQNMYYHFL GRSGYTIHVQ CNASKFHQGT LIVAAIPEHQ |
| hrv-85 | LPDALKDMGI FGENMYYHFL GRSGYTVHVQ CNASRFHQGT LLVVMIPEHQ |
| pico-85 | LPDALKDMGI FGENMYYHFL GRSGYTVHVQ CNASRFHQGT LLVVMIPEHQ |
| dq473504-88 | LPDALKSMGI FGENMFYHFL GRSGYTIHVQ CNSSKFHQGL LIVAAIPEHQ |
| a10937-89 | LPDALKNMGI FGENMFYHFL GRSGYTIHVQ CNSSKFHQGL LIVAAIPEHQ |
| hrv-89 | LPDALKNMGI FGENMFYHFL GRSGYTIHVQ CNSSKFHQGL LIVAAIPEHQ |
| hrv-89-f08 | LPDALKNMGI FGENMFYHFL GRSGYTIHVQ CNSSKFHQGL LIVAAIPEHQ |
| hrv-89-f09 | LPDALKNMGI FGENMFYHFL GRSGYTIHVQ CNSSKFHQGL LIVAAIPEHQ |
| m16248-89 | LPDALKNMGI FGENMFYHFL GRSGYTIHVQ CNSSKFHQGL LIVAAIPEHQ |
| hrv-90 | LPDALKGMGI FGENMFYHFL GRSGYTVHVQ CNASKFHQGT LIVAMIPEHQ |
| hrv-94 | LPDALKDMGI FGQNMYYHFL GRSGYTIHVQ CNASKFHQGT LIVAAIPEHQ |
| ef173419-94 | LPDALKDMGI FGQNMYYHFL GRSGYTIHVQ CNASKFHQGT LIVAAIPEHQ |
| hrv-95 | LPDALKDMGV FGENMFYHSL GRAGYLIHVQ CNASKFHSGT LLVVAIPEHQ |
| hrv-96 | LPDALKDMGI FGENMFYHFL GRSGYTVHVQ CNASKFHQGT LLVVMIPEHQ |
| hrv-98 | LPDALKDMGI FGENMFYHFL GRSGYTVHVQ CNASKFHQGT LLVAMVPEHQ |
| hrv-100 | LPDALKDMGI FGENMFYHYL GRSGYTVHVQ CNASKFHQGT LLVVMIPEHQ |
| ef186077-qpm | LPDCLRDMGV FGQNMYHHAM GRSGYIIHTQ CNATKFHSGC LLVAVVPEHQ |
| ef077279-nat001 | LPDCLKDMGI FGQNMFHHAM GRSGYIIHTQ CNATKFHSGC LLVAVVPEHQ |
| ny1078 | LPDCLKNMGI FGQNMYYHAM GRSGYIIHTQ CNATKFHSGC LLVAVVPEHQ |
| ef582385-c024 | LPDCLKDMGI FGQNLYHHAL GRSGYIIHTQ CNATKFNSGC LIVAVVPEHQ |
| ef077280-nat045 | IPDCLKDMGM FGQNMYHHSM GRSGMLIHVQ CNATKFHSGC LLVVVVPEHQ |
| ef582387-c026 | LPDCLRDMGV FGQNMYHHAM GRSGYIIHTQ CNATKFHSGC LLVAVVPEHQ |
| ef582386-c025 | IPDCLKDMGM FGQNMYYHAL GRSGYIFHVQ CNATKFHSGL LLVAIVPEHQ |
| dq473485-03 | LPDALKDMGV FGQNMFYHSL GRTGYTIHVQ CNATKFHSGC LLVVVIPEHQ |
| ef173422-03 | LPDALKDMGV FGQNMFYHSL GRTGYTIHVQ CNATKFHSGC LLVVVIPEHQ |
| dq473490-04 | LPDALKDMGI FGQNMFFHSQ GRTGYTIHVQ CNATKFHSGC LLVVVIPEHQ |
| hrv-05 | LPDALKDMGI FGQNMFFHSQ GRTGYTIHVQ CNATKFHSGC LLVVVIPEHQ |
| dq473486-06 | LPDALKDMGV FGQNMFFHSL GRSGYTIHVQ CNATKFHSGC LLVVVIPEHQ |
| 105355-14 | LPDALKDMGV FGQNMFFHSL GRSGYTVHVQ CNATKFHSGC LLVVVIPEHQ |
| k02121-14 | LPDALKDMGV FGQNMFFHSL GRSGYTVHVQ CNATKFHSGC LLVVVIPEHQ |
| ef173420-17 | LPDALKDMGV FGQNMFFHAL GRTGYTIHVQ CNATKFHSGC LLVVVVPEHQ |
| hrv-26 | LPDALKEMGI FGQNMFFHAQ GRTGYTIHVQ CNATKFHSGC LLVVVIPEHQ |
| hrv-27 | LPDALKDMGI FGQNMFYHSQ GRTGYTIHVQ CNATKFHSGT LLVVIIPEHQ |
| ef173421-27 | LPDALKDMGI FGQNMFYHSQ GRTGYTIHVQ CNATKFHSGT LLVVIIPEHQ |
| dq473487-35 | LPDALKDMGV FGQNMFYHTL GRTGYTIHVQ CNATKFHSGC LLIVVIPEHQ |
| hrv-35 | LPDALKDMGV FGQNMFYHTL GRTGYTIHVQ CNATKFHSGC LLXVVIPEHQ |
| ef173423-37 | LPDALKDMGV FGQNMFFHSL GRSGYTIHVQ CNATKFHSGC LLVVVIPEHQ |
| hrv-42 | LPDALKDMGI FGQNMFFHSQ GRTGYTIHVQ CNATKFHSGC LLVVVIPEHQ |
| dq473488-48 | LPDALKDMGV FGQNMFFHSL GRTGYTIHVQ CNATKFHSGC LLVVVVPEHQ |
| hrv-52 | LPDALKDMGV FGQNMFFHAL GRTGYTVHVQ CNATKFHSGC LLVVAIPEHQ |
| hrv-52-f10 | LPDALKDMGV FGQNMFFHAL GRTGYTVHVQ CNATKFHSGC LLVVAIPEHQ |
| ef173424-52 | LPDALKDMGV FGQNMFFHAL GRTGYTVHVQ CNATKFHSGC LLVVAIPEHQ |
| hrv-69 | LPDALKEMGV FGQNMFFHAL GRTGYTIHVQ CNATKFHSGC LLVVVIPEHQ |
| dq473489-70 | LPDALKDMGV FGQNMFFHAL GRTGYTIHVQ CNATKFHSGC LLVVVVPEHQ |
| hrv-72 | LPDALKDMGV FGQNMFFHSL GRSGYTIHVQ CNATKFHSGC LLVVVIPEHQ |
| hrv-79 | LPDALKDMGV FGQNMFFHSL GRTGYTIHVQ CNATKFHSGC LLVVVIPEHQ |
| hrv-83 | LPDALKDMGV FGQNMFFHSL GRTGYTIHVQ CNATKFHSGC LLVVVIPEHQ |
| hrv-84 | LPDALKDMGI FGQNMFYHSQ GRTGYTIHVQ CNATKFHSGT LLVVVIPEHQ |
| hrv-86 | LPDALKDMGV FGQNMFFHSL GRSGYTIHVQ CNATKFHSGC LLVVVIPEHQ |
| hrv-91 | LPDALKDMGV FGQNMFFHAL GRTGYTIHVQ CNATKFHSGC LLVVVVPEHQ |
| hrv-92 | LPDALKDMGV FGQNMFFHSL GRTGYTIHVQ CNATKFHSGC LLVVVIPEHQ |
| ef173425-93 | LPDALKDMGI FGQNMFFHSQ GRTGYTIHVQ CNATKFHSGT LLVVIIPEHQ |
| hrv-97 | LPDALKDMGI FGQNMFYHSQ GRTGYTIHVQ CNATKFHSGT LLVVIIPEHQ |
| hrv-99 | LPDALKDMGI FGQNMFYHSQ GRTGYTIHVQ CNATKFHSGC LLVVVIPEHQ |
| | 201 250 |
| annotation | .......... ..PPPPPPPP PPPPPPPPPP PP........ .....HHHHH |
| af499637-cva13 | LAGDSNSKTN YTSYVNANPG EAGGKFVSTF TPD.TGTSPK REFQPVDYLF |
| af546702-cva21 | MACNTESKTS YVSYINANPG ERGGEFTNTY NPSNTDASEG RKFAALDYLL |
| v01149-pv1m | LAGDSNTTTM HTSYQNANPG EKGGTFTGTF TPDNNQTSPA RRFCPVDYLL |
| d00239-01 | LASAKNGSVT .AGYNLTHPG EAGRVVGQQ. .RDANLRQPS D....DSWLN |
| pico-01 | LASAKHGSVT .AGYKLTHPG EAGRDVSQE. .RDASLRQPS D....DSWLN |
| hrv-01 | LASAKHGSVT .AGYKLTHPG EAGRDVSQE. .RDASLRQPS D....DSWLN |
| x02316-02 | IASALHGNVN .VGYNYTHPG ETGREVKAET R.LNPDLQPT E....EYWLN |
| hrv-07 | LASAVKGNVS .VGYKHTHPG EQGREISSE. RRTDDDRRPS D....DSWLN |
| dq473503-07 | LASAVKGNVS .VGYKHTHPG EQGREISSE. RRTDDDRRPS D....DSWLN |
| hrv-08 | LSYLGTGNVT .VGYRHTHPG ENGREIAEVA NR..NERQPS Y....DSWLN |
| pico-09 | LAAAERGNVT .AGYNFTHPG EPGREVGKPN R.QYTSKQPS D....DNWLN |
| hrv-09 | LAAAERGNVT .AGYNFTHPG EPGREVGKPN R.QYTSKQPS D....DNWLN |
| hrv-09-f01 | LAAAERGNVT .AGYNFTHPG EPGREVGKPN R.QYTSKQPS D....DNWLN |
| hrv-09-f02 | LAAAERGNVT .AGYNFTHPG EPGREVGKPN R.QYTSKQPS D....DNWLN |
| dq473498-10 | LASAHTGNVT .AGYNFTHPG EKGRTVGD.. RRDHHDKQPS D....DNWLN |
| hrv-10 | LASAHTGNVT .AGYNFTHPG EKGRTVGD.. RRDHHDKQPS D....DNWLN |
| ef173414-11 | LASATTGNVT .AGYKLTHPG ERGRDVSLTD R.QDITKQPS D....DSWLN |
| ef173415-12 | LAYIGTGNVT .VGYKHTHPG ESGRIIANNA ..DNNTRQPS D....DNWLN |
| hrv-13 | LATAAGGSVS .AGYKYTHPG EKGRDVGKIN R.ERNDRQPS D....DNWLN |
| hrv-13-f03 | LATAAGGSVS .AGYKYTHPG EKGRDVGKTG R.ERNDRQPS D....DNWLN |
| dq473493-15 | LASAEKGNVT .AGYKLTHPG EAGRDVSITN R.DHVSRQPS D....ENWLN |
| l24917-16 | LATVNKGNVN .AGYKYTHPG EAGREVGTQ. ..VENEKQPS D....DNWLN |
| hrv-18 | LASAIGGNVT .AGYKYTHPG ERGRVINVAS R.GDNEKQPS D....DNWLN |
| hrv-19 | LASATKGNVT .AGYNYTHPG EMGRDVGKIG R.ENNGKQPS D....DNWLN |
| hrv-20 | LAYIDKGSVT .VGYNHTHPG ETGRVIGGFT ..NNNSRQPS D....ENWLN |
| hrv-21 | LASASTGNVT .AGYNLTHPG EQGRDVGI.T RVEDLLKQPS D....DSWLN |
| hrv-22 | LASAGRGNVA .AGYNYTHPG EIGRDVGKEN R.EQANNQPS D....DNWLN |
| dq473497-23 | IASLQHGDVN .VGYNFTHPG EEGREVKNTT R.EHLQQQPT E....EHWLN |
| hrv-24 | LASATTGNVR .AGYNLTHPG ESGRNVDPIT R.DNPTKQPS D....DSWLN |
| ef173416-24 | LASATTGNVR .AGYNLTHPG ESGRNVDPIT R.DNPTKQPS D....DSWLN |
| hrv-25 | LANADSTKVG .AGYNYTHPG ERGRQVGD.A RDPITAVHPS D....DNWLN |
| dq473508-28 | LAFISKGNVT .VGYNYTHPG EQGREIGTFG PSSTLDRQPS D....ENWLN |
| hrv-29 | LASVGTDKVG .PGYAFTHPG EAGRQIGNVS ..EPTSKHPS D....DNWLN |
| dq473512-30 | IASLQHGNVN .VGYKFTHPG EEGREVRSN. RTEYLGQQPT E....EYWLN |
| hrv-30 | IASLQHGNVN .VGYKFTHPG EEGREVRSN. RTEYLGQQPT E....EYWLN |
| hrv-31 | LANENRTRAD .AGYNFTHPG ELGREVGN.. RRNPHDNLPS D....DNWLN |
| hrv-32 | LAAAERGNVT .AGYNFTHPG EIGRDVGKTE R.QHTSKQPS D....DNWLN |
| hrv-33 | LASATTGNAT .AGYNLTHPG EAGRDVSPKT R.ENIDKQPS D....DAWLN |
| hrv-34 | LASATYGNVA .AGYNYTHPG ERGRVINVTT R.EQNDKQPS D....DNWLN |
| dq473501-34 | LASATYGNVA .AGYNYTHPG ERGRVINVTT R.EQNDKQPS D....DNWLN |
| dq473505-36 | LASATSGNVS .VGYNHTHPG EQGREVVPS. RNSEDNKRPS D....DSWLN |
| hrv-38 | LAAAEKGNVT .AGYNLTHPG ETGRDVGITV R.EHPNKQPS D....DNWLN |
| dq473495-38 | LAAAEKGNVT .AGYNLTHPG ETGRDVGITV R.EHPNKQPS D....DNWLN |
| ay751783-39 | LASANYGNVT .AGYNYTHPG EAGRDVGQQ. .RTNNEKQPS D....DNWLN |
| hrv-40 | LASATTGNVT .AGYNYTHPG ELGRTVGQR. RSEVNIKQPS D....DNWLN |
| dq473491-41 | LATAVGGSVS .AGYNYTHPG EKGRDVGKM. DRERNDRQPS D....DSWLN |
| hrv-43 | LASATHGNVT .AGYNFTNPG EAGRNVGQI. RNEXLTKQPS D....DNWLN |
| dq473499-44 | LASVGTEKVG .PGYNFTHPG EAGRQIGNVS DR..TSKHPS D....DNWLN |
| hrv-45 | LAYIGTGNVT .VGYKHTHPG ETGRVIATTT DK..QTRQPS F....DSWLN |
| dq473506-46 | LAYIGGGNVT .VGYNHTHPG ESGRRIGGF. DGTERNRQPS D....ENWLN |
| hrv-47 | LANENSTRAD .AGYNYTHPG ERGREVGGE. RISHANL.PS D....DNWLN |
| dq473496-49 | IASALHGDVN .VGYNFTHPG ETGREVKSD. RSMNLNLQPT E....EYWLN |
| hrv-49-f04 | IASALHGDVN .VGYKYTHPG EAGREVKSD. RNINLNVQPT E....EYWLN |
| hrv-50 | LASATHGNVT .AGYNYTHPG ERGRTINVVN R.DQNDKQPS D....DNWLN |
| hrv-51 | LAFIGKGNVS .VGYRHTHPG ENGRTLNGS. RVDGNSKQPT E....ESWLN |
| dq473507-53 | LAFIKSGNVT .VGYKYTHPG EQGREIGTFG ENSVLDRQPS D....ENWLN |
| hrv-54 | LASASRGNVT .AGYNYTHPG ELGRVVGQ.A RVQTNDNQPS D....DNWLN |
| hrv-54-f05 | LASASRGNVT .AGYNYTHPG ELGRVVGQP. RTQINDHQPS D....DNWLN |
| dq473511-55 | LASATSGNVT .AGYNLTHPG EQGRDVSVTG R.QNATKQPS D....DNWLN |
| hrv-56 | LASANKGNVT .AGYNYTHPG EAGRDVGQ.T RV.NNDRQPS D....DNWLN |
| hrv-57 | LASATYGNVA .AGYRLTHPG EAGRDVSL.S RSENTEKQPS D....DNWLN |
| hrv-58 | LASATSGNVW .VGYNHTHPG EQGREVV.PT RSSTDNKRPS D....DSWLN |
| dq473500-59 | LASANIGNVT .VGYNYTHPG ESGRDVGQD. .RRSNDKQPS D....DNWLN |
| hrv-60 | LAAAEKGNVT .AGYNLTHPG EKGRTIGIPD R.LHPSKQPS D....DNWLN |
| hrv-61 | LATAVGGSVS .AGYNYTHPG EKGRDVGKLN R.ESNPRQPS D....DNWLN |
| hrv-62 | LANANSAKAG .AGYNYTHPG ERGRQVGDP. RENITAAHPS D....DNWLN |
| hrv-63 | LASASAGNVT .AGYNYTHPG EAGRDVGQ.N R.DANYKQPS D....DNWLN |
| hrv-64 | LASAHKGNVT .TGYNYTHPG ESGRDVSVEV R.DTANYQPS D....DAWLN |
| ef173417-64 | LASAHKGNVT .TGYNYTHPG ESGRDVSVEV R.DTANYQPS D....DAWLN |
| hrv-65 | LAYIGSGNVS .VGYKQTHPG ENGRTIDD.T RVNTMSNQPT D....ENWLN |
| hrv-66 | LAAASTGNVA .AGYNFTHPG EKGREVGSP. .RETHPNHPS D....DSWLN |
| hrv-67 | LAAAERGNVT .AGYNFTHPG ETGRDVGKTE R.VYQNKQPS D....DNWLN |
| hrv-68 | LAYIGKGNVT .VGYNHTHPG EKGRRIGGF. .IDNESRQPS D....ENWLN |
| hrv-71 | LAYIGSGNVS .VGYRHTHPG EQGRVIGT.. RENRNTNQPT D....ENWLN |
| dq473492-73 | LAAAKGGTVT .AGYKYTHPG EAGRDVGKTD RK.QNNRQPS D....DNWLN |
| dq473494-74 | LASAERGNVT .AGYKLTHPG EAGRDVSITT R.EHTSRQPS D....DNWLN |
| dq473510-75 | LASARHGNLT .AGYNFTHPG ENGRNVGQL. RTEYLDKQPS D....DNWLN |
| dq473502-76 | LASATTGNAT .AGYNLTHPG EGGRDVSLSN R.ADLSKQPS D....DAWLN |
| hrv-76 | LASATTGNAT .AGYNLTHPG EGGRDVSLSN R.ADLSKQPS D....DAWLN |
| hrv-77 | LASASSGNVT .AGYNFTHPG EQGREVG.ST R.ESHLKHPS D....DNWLN |
| hrv-78 | LAYIGTGNVT .VGYKHTHPG ESGRIIATNS .VNNNTRQPS D....DNWLN |
| ef173418-78 | LAYIGTGNVT .VGYKHTHPG ESGRIIATNS .VNNNTRQPS D....DNWLN |
| hrv-80 | LAYVGGGNVT .VGYNHTHPG ETGRRIGGYE NV.PRNRQPS D....ENWLN |
| hrv-81 | LATVNKANVT .AGYKYTHPG ESGRVVGTQA ...DDTKQPS D....DNWLN |
| hrv-81-f06 | LATVNKANVT .AGYKYTHPG ESGRVVGTQA ...DDTRQPS D....DNWLN |
| hrv-81-f07 | LATVNKANVT .AGYKYTHPG ESGRVVGTQA ...DDTRQPS D....DNWLN |
| hrv-82 | LASAERGNVN .TGYNYTHPG ESGRDVG.KD R.ESTRYQPS D....DNWLN |
| dq473509-82 | LASAEKGNVN .TGYNYTHPG ERGRDVGQ.E R.ESTSYQPS D....DNWLN |
| hrv-85 | LASATKGNVT .AGYNYTHPG ELGRIVGQ.T RAEINNKQPS D....DNWLN |
| pico-85 | LASATKGNVT .AGYNYTHPG ELGRIVGQ.T RAEINNKQPS D....DNWLN |
| dq473504-88 | LASALTGNVS .VGYKHTHPG EQGREISS.N RSSEDNRRPS D....DSWLN |
| a10937-89 | LASATSGNVS .VGYNHTHPG EQGREVV.PS RTSSDNKRPS D....DSWLN |
| hrv-89 | LASATSGNVS .VGYNHTHPG EQGREVV.PS RTSSDNKRPS D....DSWLN |
| hrv-89-f08 | LASATSGNVS .VGYNHTHPG EQGREVV.PS RTSSDNKRPS D....DSWLN |
| hrv-89-f09 | LASATSGNVS .VGYNHTHPG EQGREVV.PS RSSSDNKRPS D....DSWLN |
| m16248-89 | LASATSGNVS .VGYNHTHPG EQGREVV.PS RTSSDNKRPS D....DSWLN |
| hrv-90 | LASALAGNVT .AGYNLTHPG EGGRTVDQTN R.ENQSKQPS D....DSWLN |
| hrv-94 | LASAHKGNVN .TGYNYTHPG ETGRDVGTEV R.DTANYQPS D....DAWLN |
| ef173419-94 | LASAHKGNVN .TGYNYTHPG ETGRDVGTEV R.DTANYQPS D....DAWLN |
| hrv-95 | LSYLGTGNVT .VGYRHTHPG ENGREIAEVA NRN..ERQPS Y....DSWLN |
| hrv-96 | LATAAGGSVS .AGYNYTHPG EKGRDVGKEG R.EANVRQPS D....DNWLN |
| hrv-98 | LASASRGNVT .AGYNYTHPG ELGRVVGQ.A RTQTSGNQPS D....DNWLN |
| hrv-100 | LASAHTGNVT .AGYNFTHPG EKGRTVGDER KH..REKQPS D....DNWLN |
| ef186077-qpm | LAYIGGDNTR .VKYKHTHPG ELGHKIGSN. .SERGDNQPD E....NPFFN |
| ef077279-nat001 | LAYIGAD.AR .VSYEHTHPG EKGHVIGSN. .SDRNNHQPD E....SAFFN |
| ny1078 | LAYIGVD.AQ .VSYKHTHPG ERGHEIGRN. .TNRDDNQPD E....NPFFN |
| ef582385-c024 | LAYIGEANVN .VGYDHTHPG EGGHVIGSN. .VRRDNKQPD E....DPFFN |
| ef077280-nat045 | LAYIGAGGVN .VKYEHTHPG ERGHTLQAS. .DVRSNHNPD E....DPFYL |
| ef582387-c026 | LAYIGGTNAQ .VKYKHTHPG EQGHRIGSN. .SERNENQPD E....NPFFN |
| ef582386-c025 | LAYIGGTNAN .VGYNHTHPG EGGHEIGKN. .TERNDKQPD E....DPLFN |
| dq473485-03 | LASHEGGTVS .VKYKYTHPG DRGIDLDTVE VA....GGPT S....DAIYN |
| ef173422-03 | LASHEGGTVS .VKYKYTHPG DRGIDLDTVE VA....GGPT S....DAIYN |
| dq473490-04 | LASIQGGSVS .VYYEKTHPG EKGIDLNESD .....GDGPM L....DPLYM |
| hrv-05 | LASAEGGNVS .VLYDKTHPG EKGIDLSEAD .....STGPM K....DPLYM |
| dq473486-06 | LASHKGGNVS .VKYKYTHPG ESGIDLSTQL DE....DGPV K....DPVYS |
| 105355-14 | LASHEGGNVS .VKYTFTHPG ERGIDLSSAN EV....GGPV K....DVIYN |
| k02121-14 | LASHEGGNVS .VKYTFTHPG ERGIDLSSAN EV....GGPV K....DVIYN |
| ef173420-17 | LASHTEGNVS .VKYKYTHPG EQGIELDSAA EE....GGAS H....DPVYS |
| hrv-26 | LASIKGANVS .VLYDKTHPG ESGIDLNTTD ED.....GPM K....DPLYM |
| hrv-27 | LASAEGGNVS .VFYDQTHPG ERGIDLGTVI E.....KGPM T....DPIYN |
| ef173421-27 | LASAEGGNVS .VFYDQTHPG ERGIDLGTVI E.....KGPM T....DPIYN |
| dq473487-35 | LASHDGGTVS .VKYKFTHPG DQGIDLSTAE ET....NGPV K....NPVYN |
| hrv-35 | LASHDGGTVS .VKYKFTHPG DQGIDLSTAE ET....NGPV K....NPVYN |
| ef173423-37 | LASHEGSNVS .VKYKFTHPG ENGIDLELPP EK....DGPV K....NPVYG |
| hrv-42 | LASIEGGNVS .VLYDKTHPG EKGIDLND.E DP....KGPM K....DPLYM |
| dq473488-48 | LASRTEGNVS .VNYKYTHPG ERGIDLDEAE KE....GGAT H....NPVYS |
| hrv-52 | LASHTQGNVS .VKYKYTHPG EQGINLNDIP EE....GGAS H....DPVYS |
| hrv-52-f10 | LASHTQGNVS .VKYKYTHPG ESGINLDDTP EA....GGAS H....DPVYS |
| ef173424-52 | LASHTQGNVS .VKYKYTHPG EQGINLNDIP EE....GGAS H....DPVYS |
| hrv-69 | LASHTEGNVS .VKYKYTHPG ETGINLSDAV AT....GGAS H....DPVYS |
| dq473489-70 | LASHTQGNVS .VKYKYTHPG EQGIDLDSVA ET....GGAS H....DPVYS |
| hrv-72 | LASHEGGNVS .VKYKLTHPG EGGIDLSTNI EA....DGPV K....DPVYN |
| hrv-79 | LASHDGGTVS .VKYEFTHPG DQGIDLSTAE VQ....FGPA K....DAIYS |
| hrv-83 | LASHDGGTVS .VKYKFTHPG EQGIDLGTSG ER....TGPA K....DAVYN |
| hrv-84 | LASAKGGNVS .VYYDKTHPG ENGIDLSVA. DE....LGPK T....DPVYN |
| hrv-86 | LASHQGGNVS .VKYTLTHPG EAGIDLSKAE VD....KGPS N....NPVYS |
| hrv-91 | LASHTEGNVS .VKYKYTHPG EQGIELSNLA EE....GGAS H....DPVYS |
| hrv-92 | LASHDGGSVS .VKYKYTHPG DQGIDLGTTE EN....FGPA K....DAVYS |
| ef173425-93 | LASANGGNVS .VLYDKTHPG ENGIDLGS.E VK....DGPM T....DPIYN |
| hrv-97 | LASAEGGNVS .VLYDKTHPG ENGIDLNTN. DA....KGPK T....DPIYN |
| hrv-99 | LASIEGANVS .VLYDKTHPG EQGIDLSKT. DP....KGPV R....DPLYM |
| | 251 300 |
| annotation | HH..HHBHHH ..BBBFBBB. ..BBBBGBB. .......... ....BBBBBH |
| af499637-cva13 | GCGVMAGNAF VFPHQIINLR TNNCATLVLP YVNSLAIDCM AKHNNWGIVI |
| af546702-cva21 | GSGVLAGNAF VYPHQIINLR TNNSATIVVP YVNSLVIDCM AKHNNWGIVI |
| v01149-pv1m | GNGTLLGNAF VFPHQIINLR TNNCATLVLP YVNSLSIDSM VKHNNWGIAI |
| d00239-01 | FDGTLLGNLL IFPHQFINLR SNNSATLIVP YVNAVPMDSM LRHNNWSLVI |
| pico-01 | FDGTLLGNLL IFPHQFINLR SNNSATLIVP YVNAVPMDSM LRHNNWSLVI |
| hrv-01 | FDGTLLGNLL IFPHQFINLR SNNSATLIVP YVNAVPMDSM LRHNNWSLVI |
| x02316-02 | FDGTLLGNIT IFPHQFINLR SNNSATIIAP YVNAVPMDSM RSHNNWSLVI |
| hrv-07 | FDGTLLGNLP IYPHQYINLR TNNSATLILP YINAVPMDSM LRHNNWSLVI |
| dq473503-07 | FDGTLLGNLP IYPHQYINLR TNNSATLILP YINAVPMDSM LRHNNWSLVI |
| hrv-08 | CNGTLLGNAL IFPHQFINLR TNNAATLILP YVNATPMDFM LRHNNWSLLI |
| pico-09 | FDGTLLGNIT IYPHQFINLR SNNSATIIVP YVNAVPMDSM LRHNNWSLVI |
| hrv-09 | FDGTLLGNIT IYPHQFINLR SNNSATIIVP YVNAVPMDSM LRHNNWSLVI |
| hrv-09-f01 | FDGTLLGNIT IYPHQFINLR SNNSATIIVP YVNAVPMDSM LRHNNWSLVI |
| hrv-09-f02 | FDGTLLGNIT IYPHQFINLR SNNSATIIVP YVNAVPMDSM LRHNNWSLVI |
| dq473498-10 | FDGTSLGNAL IFPHQFINLR SNNSATIIVP YVNAVPMDSM LRHNNWSLVI |
| hrv-10 | FDGTSLGNAL IFPHQFINLR SNNSATIIVP YVNAVPMDSM LRHNNWSLVI |
| ef173414-11 | FDGTLLGNIT IYPHQFINLR SNNSATIIVP YVNAVPMDSM LRHNNWSLVI |
| ef173415-12 | CDGTLMGNLP IFPHQFINLR TNNSATLILP YMNCVSMDSM LRHNNWSLLI |
| hrv-13 | FDGTLLGNLT IFPHQFINLR SNNSATIIVP YVNAVPMDSM LRHNNWSLVI |
| hrv-13-f03 | FDGTLLGNLT IFPHQFINLR SNNSATIIVP YVNAVPMDSM LRHNNWSLVI |
| dq473493-15 | FDGTLLGNIT IFPHQFINLR SNNSATLIVP YVNAVPMDSM LRHNNWSLVI |
| l24917-16 | FDGTLLGNLL IFPHQFINLR SNNSATLIVP YVNAVPMDSM VRHNNWSLVI |
| hrv-18 | FDGTLLGNIT IYPHQLINLR SNNSATIIVP YVNAVPMDSM LRHNNWSLVI |
| hrv-19 | FDGTLLGNIT IFPHQFINIR SNNSATLILP YVNAVPMDSM LRHNNWSLVI |
| hrv-20 | CDGTLLGNIT IYPHQYINLR SNNSATLILP YVNAVPMDSM VRHNNWSIVI |
| hrv-21 | FDGTLLGNIT IFPHQFINLR SNNSATIIVP YVNAVPMDSM PRHNNWSLVI |
| hrv-22 | FDGTLLGNIT IFPHQFINLR SNNSATLILP YVNAVPMDSM LRHNNWSLVI |
| dq473497-23 | FDGTLLGNIT IFPHQFINLR SNNSATIIVP YVNAVPMDSM RSHNNWSLVI |
| hrv-24 | FDGTLLGNIT IFPHQFINLR SNNSATIIVP YVNAVPMDSM LRHNNWSLVI |
| ef173416-24 | FDGTLLGNIT IFPHQFINLR SNNSATIIVP YVNAVPMDSM LRHNNWSLVI |
| hrv-25 | FDGTMLGNVL IFPHQFINLR SNNSATIIVP YVNAVPMDSM LRHNNWSLVI |
| dq473508-28 | CDGTLLGNIT VYPHQFINLR SNNSATLILP YVNAVPMDSM VRHNNWSIVI |
| hrv-29 | FDGTLLGNVL IFPHQFINLR SNNSATIIVP YVNAVPMDSM LRHNNWSLVI |
| dq473512-30 | FDGTLLGNIT IFPHQFINLR SNNSATIIVP YVNAVPMDSM RSHNNWSLVI |
| hrv-30 | FDGTLLGNIT IFPHQFINLR SNNSATIIVP YVNAVPMDSM RSHNNWSLVI |
| hrv-31 | FDGTLLGNAL IYPHQFINLR SNNSATLIVP YVNAVPMDSM LRHNNWSLVI |
| hrv-32 | FDGTLLGNIT IFPHQFINLR SNNSATIIVP YVNAVPMDSM LRHNNWSLVI |
| hrv-33 | FDGTLLGNIT VYPHQLINLR SNNSATIIVP YVNAVPMDSM LRHNNWSLVI |
| hrv-34 | FDGTLLGNIT IYPHQLINLR SNNSATIIVP YVNAVPMDSM LRHNNWSLVI |
| dq473501-34 | FDGTLLGNIT IYPHQLINLR SNNSATIIVP YVNAVPMDSM LRHNNWSLVI |
| dq473505-36 | FDGTLLGNLP IYPHQYINLR TNNSATLILP YVNAVPMDSM LRHNNWSLVI |
| hrv-38 | FDGTLLGNIT IFPHQFINLR SNNSATIIVP YVNAVPMDSM LRHNNWSLVI |
| dq473495-38 | FDGTLLGNIT IFPHQFINLR SNNSATIIVP YVNAVPMDSM LRHNNWSLVI |
| ay751783-39 | FDGTLLGNLL IFPHQFINLR SNNSATIIVP YVNAVPMDSM LRHNNWSLLI |
| hrv-40 | FDGTFLGNLL IFPHQFINLR SNNSATIIVP YVNAVPMDSM LRHNNWSLLI |
| dq473491-41 | FDGTLLGNLT IFPHQFINLR SNNSATIIVP YVNAVPMDSM LRHNNWSLVI |
| hrv-43 | FDGTLLGNIT IFPHQFINLR SNNSATIIVP YVNAVPMDSM LRHNNWSLVI |
| dq473499-44 | FDGTLLGNVL IFPHQFINLR SNNSATIIVP YVNAVPMDSM LRHNNWSLVI |
| hrv-45 | CNGTLLGNAL IFPHQFINLR TNNAATLILP YVNATPMDSM LRHNNWSLLI |
| dq473506-46 | CNGTLLGNLT IFPHQFINLR SNNSATLILP YVNAVPMDSM LRHNNWSLVI |
| hrv-47 | FDGTLLGNAL IFPHQFINLR SNNSATLIVP YVNAVPMDSM LRHNNWSLVI |
| dq473496-49 | FDGTLLGNIT IFPHQFINLR SNNSATIIAP YVNAVPMDSM RSHNNWSLVI |
| hrv-49-f04 | FDGTLLGNIT IFPHQFINLR SNNSATIIAP YVNAVPMDSM RSHNNWSLVI |
| hrv-50 | FDGTLLGNIT IYPHQLINLR SNNSATIIVP YVNAVPMDSM PRHNNWSLVI |
| hrv-51 | CDGTLLGNIT IYPHQFINLR SNNSATLILP YVNAVPMDSM LRHNNWSLVI |
| dq473507-53 | CDGTLLGNIT VYPHQYINLR SNNSATLILP YVNAVPMDSM VRHNNWSIVI |
| hrv-54 | FDGTFLGNLL IFPHQFINLR TNNSATIIVP YVNAVPMDSM LRHNNWSLLI |
| hrv-54-f05 | FDGTFLGNLL IFPHQFINLR SNNSATIIVP YVNAVPMDSM LRHNNWSLLI |
| dq473511-55 | FDGTLLGNIT IYPHQLINLR SNNSATIIVP YVNAVPMDSM LRHNNWSLVI |
| hrv-56 | FDGTFMGNLL IFPHQFINLR SNNSATIIVP YVNAVPMDSM LRHNNWSLLI |
| hrv-57 | FDGTLLGNIT IFPHQFINLR SNNSATIIVP YVNAVPMDSM LRHNNWSLVI |
| hrv-58 | FDGTLLGNLP IYPHQYINLR TNNSATLILP YVNAVPMDSM LRHNNWSLVI |
| dq473500-59 | FDGTLLGNLL IFPHQFINLR SNNSATIIVP YVNAVPMDSM LRHNNWSLLI |
| hrv-60 | FDGTLLGNIT IFPHQFINLR SNNSATIIVP YVNAVPMDSM LSHNNWSLVI |
| hrv-61 | FDGTLLGNLT IFPHQFINLR SNNSATIIVP YVNAVPMDSM LRHNNWSLVI |
| hrv-62 | FDGTMLGNVL IFPHQFINLR SNNSATIIVP YVNAVPMDSM LRHNNWSLVI |
| hrv-63 | FDGTLLGNLL IFPHQFINLR SNNSATIIVP YVNAVPMDSM LRHNNWSLLI |
| hrv-64 | FDGTLLGNIT IFPHQFINLR SNNSATLILP YVNAVPMDSM LRHNNWSLVI |
| ef173417-64 | FDGTLLGNIT IFPHQFINLR SNNSATLILP YVNAVPMDSM LRHNNWSLVI |
| hrv-65 | CDGTLLGNIT IYPHQFINLR SNNSATLILP YVNAVPMDSM LRHNNWSIVI |
| hrv-66 | FDGTLLGNAL IFPHQFINLR SNNSATIIVP YVNAVPMDSM LRHNNWSLVI |
| hrv-67 | FDGTLLGNIT IFPHQFINLR SNNSATIIVP YVNAVPMDSM LRHNNWSLVI |
| hrv-68 | CDGTLLGNIT IYPHQYINLR SNNSATLILP YVNAVPMDSM VRHNNWSIVI |
| hrv-71 | CDGTLLGNIT IFPHQFINLR SNNSATLILP YVNAVPMDSM IRHNNWSIVI |
| dq473492-73 | FDGTLLGNST IFPHQFINLR SNNSATIIVP YVNAVPMDSM LRHNNWSLVI |
| dq473494-74 | FDGTLLGNIT IFPHQFINLR SNNSATLIVP YVNAVPMDSM LRHNNWSLVI |
| dq473510-75 | FDGTLLGNIT IFPHQFINLR SNNSATIIVP YVNAVPMDSM LRHNNWSLVI |
| dq473502-76 | FDGTLLGNIT VYPHQLINLR TNNSATIIVP YVNAVPMDSM VRHNNWSLVI |
| hrv-76 | FDGTLLGNIT VYPHQLINLR TNNSATIIVP YVNAVPMDSM VRHNNWSLVI |
| hrv-77 | FDGTLLGNAL IFPHQFINLR TNNSATIIVP YVNAVPMDSM LRHNNWSLVI |
| hrv-78 | CNGTLMGNLP IFPHQFINLR SNNSATLILP YMNAVPMDSM LRHNNWSIVI |
| ef173418-78 | CNGTLMGNLP IFPHQFINLR SNNSATLILP YMNAVPMDSM LRHNNWSIVI |
| hrv-80 | CNGTLLGNLT IFPHQFINLR SNNSATLILP YVNAVPMDSM LRHNNWSLVI |
| hrv-81 | FDGTLLGNLL IFPHQFINLR SNNSATIIVP YVNAVPMDSM VRHNNWSLVI |
| hrv-81-f06 | FDGTLLGNLL IFPHQFINLR SNNSATIIVP YVNAVPMDSM VRHNNWSLVI |
| hrv-81-f07 | FDGTLLGNLL IFPHQFINLR SNNSATIIVP YVNAVPMDSM VRHNNWSLVI |
| hrv-82 | FDGTLLGNIT IFPHQFINLR SNNSATLILP YVNAVPMDSM LRHNNWSLVI |
| dq473509-82 | FDGTLLGNIT IFPHQFINLR SNNSATLILP YVNAVPMDSM LRHNNWSLVI |
| hrv-85 | FDGTFLGNVL IFPHQFINLR SNNSATIIVP YVNAVPMDSM LRHNNWSLVI |
| pico-85 | FDGTFLGNVL IFPHQFINLR SNNSATIIVP YVNAVPMDSM LRHNNWSLVI |
| dq473504-88 | FDGTLLGNLP IYPHQYINLR TNNSATLILP YVNAVPMDSM LRHNNWSLVI |
| a10937-89 | FDGTLLGNLP IYPHQYINLR TNNSATLILP YVNAVPMDSM LRHNNWSLVI |
| hrv-89 | FDGTLLGNLP IYPHQYINLR TNNSATLILP YVNAVPMDSM LRHNNWSLVI |
| hrv-89-f08 | FDGTLLGNLP IYPHQYINLR TNNSATLILP YVNAVPMDSM LRHNNWSLVI |
| hrv-89-f09 | FDGTLLGNLP IYPHQYINLR TNNSATLILP YVNAVPMDSM LRHNNWSLVI |
| m16248-89 | FDGTLLGNLP IYPHQYINLR TNNSATLILP YVNAVPMDSM LRHNNWSLVI |
| hrv-90 | FDGTLLGNIT IFPHQFINLR SNNSATIIVP YVNAVPMDSM LRHNNWSLVI |
| hrv-94 | FDGTLLGNIT IFPHQFINLR SNNSATLILP YVNAVPMDSM LRHNNWSLVI |
| ef173419-94 | FDGTLLGNIT IFPHQYINLR SNNSATLILP YVNAVPMDSM LRHNNWSLVI |
| hrv-95 | CNGTLLGNAL IFPHQFINLR TNNAATLILP YVNATPMDSM LRHNNWSLLI |
| hrv-96 | FDGTLLGNLT IFPHQFINLR SNNSATIIVP YVNAVPMDSM LRHNNWSLVI |
| hrv-98 | FDGTFLGNLL IFPHQFINLR SNNSATIIVP YVNAVPMDSM LRHNNWSLLI |
| hrv-100 | FDGTLLGNAL IFPHQFINLR SNNSATIIVP YVNAVPMDSM LRHNNWSLVI |
| ef186077-qpm | CNGTLLGNLT IFPHQLINLR TNNSSTIVVP YINCTPMDSM LRHNNVSLVI |
| ef077279-nat001 | CNGTLLGNLT IFPHQLINLR TNNSSTIVVP YINCTPMDSM LRHNNVSLVI |
| ny1078 | CNGTLLGNLT IFPHQLINLR TNNSSSIVVP YINCTPMDSM LRHNNVSLVI |
| ef582385-c024 | CNGTLLGNIT IFPHQLINLR TNNSSTIVVP YINCVPMDNM LRHNNLSLVI |
| ef077280-nat045 | CNGTLLGNAL IYPHQMINLR TNNSATIVVP YINCVPMDNM LRHNNVSLLI |
| ef582387-c026 | CNGTLLGNLT IFPHQLINLR TNNSSTIVVP YINCTPMDSM LRHNNVSLVI |
| ef582386-c025 | CNGTLLGNLT IFPHQLINLR TNNSATIVVP YINCVPMDSM LRHNNISLVI |
| dq473485-03 | MDGTLLGNLL IFPHQFINLR TNNTATIVVP YINSVPIDSM TRHNNVSLMV |
| ef173422-03 | MDGTLLGNLL IFPHQFINLR TNNTATIVVP YINSVPIDSM TRHNNVSLMV |
| dq473490-04 | MDGTLIGNSL IFPHQFINLR TNNTATIVVP YINSVPMDSM TRHNNLSLMV |
| hrv-05 | MDGTLIGNSL IFPHQFINLR TNNTATIVVP YINSVPMDSM TRHNNLSLMV |
| dq473486-06 | MNGTLLGNLL IFPHQFINLR TNNTATIVVP YINSVPIDSM TRHNNVSLLV |
| l05355-14 | MNGTLLGNLL IFPHQFINLR TNNTATIVIP YINSVPIDSM TRHNNVSLMV |
| k02121-14 | MNGTLLGNLL IFPHQFINLR TNNTATIVIP YINSVPIDSM TRHNNVSLMV |
| ef173420-17 | MNGTLVGNLL IFPHQFINLR TNNTATIIVP YINSVPMDSM TRHNNASLLV |
| hrv-26 | MNGTLIGNSL IFPHQFINLR TNNTATIVVP YINSVPMDSM TRHNNLSLMV |
| hrv-27 | MDGTLLGNVL IFPHQFINLR TNNTATIVTP YINSVPMDSM TRHNNLSLLV |
| ef173421-27 | MDGTLLGNVL IFPHQFINLR TNNTATIVTP YINSVPMDSM TRHNNLSLLV |
| dq473487-35 | MDGTLLGNLL IFPHQFINLR TNNTATIIVP YMNSVPMDSM TRHNNVSLMV |
| hrv-35 | MDGTLLGNLL IFPHQFINLR TNNTATIIVP YMNSVPMDSM TRHNNVSLMV |
| ef173423-37 | MNGTLLGNLL IFPHQFINLR TNNTATIVVP YINSVPIDSM TRHNNVSLMV |
| hrv-42 | MDGTLIGNSL IFPHQFINLR TNNTATIVVP YINSVPMDSM TRHNNLSLLV |
| dq473488-48 | MNGTLVGNLL IFPHQFINLR TNNTATLVIP YINSVPMDSM TRHNNVSLLV |
| hrv-52 | MNGTLVGNLL IFPHQFINLR TNNTATLILP YINSVPMDSM TRHNNISLLV |
| hrv-52-f10 | MNGTLVGNLL IFPHQFINLR TNNTATLILP YINSVPMDSM TRHNNISLLV |
| ef173424-52 | MNGTLVGNLL IFPHQFINLR TNNTATLILP YINSVPMDSM TRHNNISLLV |
| hrv-69 | MNGTLVGNLL IFPHQFINLR TNNTATLIVP YINSVPMDSM TRHNNVSLLV |
| dq473489-70 | MNGTLIGNLL IFPHQFINLR TNNTATIIVP YINSVPMDSM TRHNNVSLLV |
| hrv-72 | MNGTLLGNLL IFPHQFINLR TNNTATLVVP YINSVPIDSM TRHNNVSLMI |
| hrv-79 | MDGTLLGNLL IFPHQFINLR TNNTATIIVP YMNSVPIDSM TRHNNISLMV |
| hrv-83 | MDGTLIGNLT IFPHQFINLR TNNTATIIVP YINSVPIDSM TRHNNISLMV |
| hrv-84 | MDGTLLGNAL IFPHQFINLR TNNTATLVMP YINSVPMDSM TRHNNLSLLV |
| hrv-86 | MNGTLLGNLL IFPHQFINLR TNNTATIVVP YINSVPIDSM TRHNNVSLLI |
| hrv-91 | MNGTLIGNLL IFPHQFINLR TNNTATIIVP YINSVPMDSM TRHNNLSLLV |
| hrv-92 | MDGTLLGNLT IFPHQFINLR TNNTATIVVP YINSVPIDSM TRHNNVSLMV |
| ef173425-93 | MDGTLLGNVL IFPHQFINLR TNNTATIVTP YINSAPMDSM TRHNNLSLLV |
| hrv-97 | MDGTLLGNVL IFPHQFINLR TNNTATIVTP YINSVPMDSM TRHNNLSLLV |
| hrv-99 | MNGTLIGNSL IFPHQFINLR TNNTATIVIP YINSVPMDSM TRHNNLSLMV |
| | 301 350 |
| annotation | BBBBBBBB.. ......BBBB BBBIBBBBBB BBB....... ....QG.... |
| af499637-cva13 | LPLSKLDYNP DAST.KLPIT VTIAPMCCEF NGLRNLTIP. ..ATQGLPVM |
| af546702-cva21 | LPLAPLAFAA TSSP.QVPIT VTIAPMCTEF NGLRNITVP. ..VHQGLPTM |
| v01149-pv1m | LPLAPLNFAS ESSP.EIPIT LTIAPMCCEF NGLRNITLP. ..RLQGLPVM |
| d00239-01 | IPISPLRSET TSSN.IRPIT VSISPMCAEF SGARAK.... .NVRQGLPVY |
| pico-01 | IPISPLRSET TSSN.IVPIT VSISPMCAKF SGARAK.... .NIKQGLPVY |
| hrv-01 | IPISPLRSET TSSN.IVPIT VSISPMCAEF SGARAK.... .NIKQGLPVY |
| x02316-02 | IPICPLE.TS SAIN.TIPIT ISISPMCAEF SGARAK.... ...RQGLPVF |
| hrv-07 | IPICPLQVES SGTP.TVPIT VSISPMFSEF SGPRNKVVF. ...TQGLPVM |
| dq473503-07 | IPICPLQVES SGIP.TVPIT VSISPMFSEF SGPRNKVVF. ...TQGLPVM |
| hrv-08 | VPISQLR... GDTN.SIPIT ISISPMAAEF SGARNR.... SARIEGLPVM |
| pico-09 | IPICPLQSSG TESS.TIPIT ISISPMFAEF SGARAK.... ...SQGLPVL |
| hrv-09 | IPICPLQSSG TESS.TXPIT ISISPMFAEF SGARAK.... ...SQGLPVL |
| hrv-09-f01 | IPICPLQSSG TESS.TIPIT ISISPMFAEF SGARAK.... ...SQGLPVL |
| hrv-09-f02 | IPICPLQSSG TESS.TIPIT ISISPMFAEF SGARAK.... ...SQGLPVL |
| dq473498-10 | IPISPLKSDP SASA.LVPIT ISISPMFAEF SGARAK...T AAANQGLPVY |
| hrv-10 | IPISPLKSDP SASA.LVPIT ISISPMFAEF SGARAK...T AAANQGLPVY |
| ef173414-11 | IPICPLESDL ..NT.PVPIT ISISPMCAEF SGARAR.... ...NQGLPVL |
| ef173415-12 | IPVCPLQVDA QATR.FVPIT ISISPMSAEF SGARN..... ATIPQGLPVM |
| hrv-13 | IPICELKCNN .TAV.TVPIT ISISPMCAEF SGARAR.... .NVTQGLPTL |
| hrv-13-f03 | IPICELKCNN .TAV.TVPIT ISISPMCAEF SGARAR.... .NVTQGLPTL |
| dq473493-15 | IPICQLEVVG GVSN.TVPIT ISISPMFAEF SGARAR.... ...SQGLPVM |
| l24917-16 | IPVCQLQSNN .ISN.IVPIT VSISPMCAEF SGARAK.... .TVVQGLPVY |
| hrv-18 | IPICQLE... GDPP.TIPIT ISISPMCAEF SGVRAR.... ...SQGLPAM |
| hrv-19 | IPICPLESQ. GTEG.VVPIT VSISPMFAEF SGARAR.... ...SQGLPVM |
| hrv-20 | IPISKIQFEN GATP.YVPIT LSISPMCSEF SGARN..... .NTTQGLPVM |
| hrv-21 | IPICPLESD. GQTP..VPIT ISISPMCAEF SGARAK.... ...SQGLPVM |
| hrv-22 | IPICPLEAS. GADV.TVPIT ISISPMFAEF SGARAR.... ...SQGLPVL |
| dq473497-23 | IPICPLETMS .TIT.TVPIT ISISPMCAEF SGARAR.... ...SQGLPVL |
| hrv-24 | IPICPLENST EVPN.AVPIT ISISPMCAEF SGARAR.... ...SQGLPVM |
| ef173416-24 | IPICPLENST EVPN.AVPIT ISISPMCAEF SGARAR.... ...SQGLPVM |
| hrv-25 | IPVSKLQADN .TSV.VVPIT ISISPMFAEF SGARAR..PT RAASQGLPTF |
| dq473508-28 | IPISKLETQ. GGTS.IVPIT ISISPMFSEF SGARN..... .NIPQGLPVM |
| hrv-29 | IPISELQAEN ATNV.TVPIT VSISPMFAEF SGARAR..PA RATTQGLPIY |
| dq473512-30 | IPICPLETMS .TIT.TVPIT ISISPMCAEF SGARAK.... ...SQGLPVL |
| hrv-30 | IPICPLETMS .TIT.TVPIT ISISPMCAEF SGARAK.... ...SQGLPVL |
| hrv-31 | IPICELLVDS TVNA.IVPIT ISISPMFAEF SGARAK...P EAASQGLPIY |
| hrv-32 | IPICPLQSEG TVST.TIPIT ISISPMFAEF SGARAK.... ...SQGLPVL |
| hrv-33 | IPICPLESVP ...ASTVPIT ISISPMCAEF SGARAA.... .ARNQGLPVF |
| hrv-34 | IPICQLE... GTPG.TVPIT ISISPMCAEF SGARAK.... ...NQGLPVM |
| dq473501-34 | IPICQLE... GTPG.TVPIT ISISPMCAEF SGARAK.... ...NQGLPVM |
| dq473505-36 | IPICPLQVQT GGTN.SIPIT VSISPMFSEF SGPRNKVVF. .GATEGLPVM |
| hrv-38 | IPICPLEVSS PGSN.SIPIT VSISPMFAEF SGARAR.... ...SQGLPTM |
| dq473495-38 | IPICPLEVSS PGSN.SIPIT VSISPMFAEF SGARAR.... ...SQGLPTM |
| ay751783-39 | IPVSPLEADT SATA.IVPIT VSISPMFSEF SGARAR...P AAATQGLPVY |
| hrv-40 | IPISPLKSDM SATS.KVPIT ISISPMCAEF SGARAR...P SATTQGLPVY |
| dq473491-41 | IPICELKCDT .TAA.TVPIT ISISPMCAEF SGARAR.... .NVTQGLPTL |
| hrv-43 | IPICELQVEG GVPR.TVPIT ISISPMYAEF SGARAK.... ...SQGIPTM |
| dq473499-44 | IPISELQTEN ATNV.TVPIT VSISPMFAEF SGARAR..PA RAAAQGLPIY |
| hrv-45 | VPVSELRGDT .....SIPIT VSISPMAAEF SGARNR.... SARVEGLPVM |
| dq473506-46 | IPVCPLEVAQ GSEQ.YVPIT ISISPMCSEF SGARN..... AARTQGLPVF |
| hrv-47 | IPICELLADS KASA.VVPIT ISISPMFAEF SGARAK...P VAAPQGLPIY |
| dq473496-49 | IPICPLETSS .TVN.TIPIT ISISPMCAEF SGARAK.... ...SQGLPVF |
| hrv-49-f04 | IPICPLETSS .TVN.TIPIT ISISPMCAEF SGARAK.... ...NQGLPVF |
| hrv-50 | IPICPLE... GTPT.TVPIT ISISPMCAEF SGARAK.... ...SQGLPVM |
| hrv-51 | IPVSPLASES ..TD.KVPIT ISISPMCSEF SGARNQ.... .STKQGLPVM |
| dq473507-53 | IPISKLVSV. GGTA.YVPIT ISISPMASEF SGARN..... NSPQGLPVM |
| hrv-54 | IPVSPLKSDQ .ASV.RVPIT ISISPMCAEF SGARAR...P AAAAQGLPVY |
| hrv-54-f05 | IPVSSLKSDQ .ASV.RVPIT ISISPMCAEF SGARAR...P AAAAQGLPVY |
| dq473511-55 | IPICPLEA.Q GVPN.TVPIT VSISPMCAEF SGARAK.... ...SQGLPVM |
| hrv-56 | IPVSPLKSDT LATS.QVPIT ISISPMCAEF SGARAK...P NAAPQGLPVY |
| hrv-57 | IPICPLEANG IQPV.VVPIT ISISPMCAEF SGARAK.... ...SQGLPVM |
| hrv-58 | IPICPLQVEG GGTP.SIPIT VSISPMFSEF SGPRNKVVF. ...SQGLPVM |
| dq473500-59 | IPVSPLKSDA SATS.KVPIT ISISPMFAEF SGARAK...P MAVGQGLPVY |
| hrv-60 | IPICPLEVST TGTN.GIPIT VSISPMFAEF SGARAR.... ...SQGLPTM |
| hrv-61 | IPICELRGS. GVDL.TIPIT ISISPMCAEF SGARAN.... ...SQGLPVL |
| hrv-62 | IPVSKLQADN TGSV.VVPIT ISISPMFAEF SGARAR..PA RATTEGLPTY |
| hrv-63 | IPISPLNSDP LATA.KVPIT ISISPMCAEF SGARAK...P VAVGQGLPVY |
| hrv-64 | IPICPLETES .VDT.TVPIT ISISPMYAEF SGARAR.... ...SQGLPVL |
| ef173417-64 | IPICPLETES .VDT.TVPIT ISISPMYAEF SGARAR.... ...SQGLPVL |
| hrv-65 | IPVSPLDSQA ..TG.NVPIT ISISPMCSEF SGARNQSV.. ...KQGLPVM |
| hrv-66 | IPVSPLKAEN ATSV.IVPIT ISISPMFAEF SGARAR...P VA..QGLPVY |
| hrv-67 | IPICPLQVEG AGSN.IIPIT VSISPMFAEF SGARAR.... ...NQGLPVL |
| hrv-68 | IPISQLKFEP GATP.FIPIT LSISPMCSEF SGARNN.... ..TTQGLPVM |
| hrv-71 | IPISPLEAN. .VTD.PVPIT ISISPMCTEF SGARNQSV.. ..KIQGLPVM |
| dq473492-73 | IPICKLRCQ. GISP.VVPIT ISISPMCAEF SGARAR.... .NVTQGLPTF |
| dq473494-74 | IPICPLEVSG NEVN.TVPIT ISISPMFAEF SGARAR.... ...SQGLPVM |
| dq473510-75 | IPICELQVDT GVPA.TVPIT ISISPMFAEF SGARAR.... ...SQGIPTM |
| dq473502-76 | IPICPLESLP ...SSTVPIT ISISPMCAEF SGARA..... TARNQGLPVF |
| hrv-76 | IPICPLESLP ...SSTVPIT ISISPMCAEF SGARA..... TARNQGLPVF |
| hrv-77 | IPISPLKSDT AATA.IVPIT ISISPMFAEF SGARAH...P TA..QGLPVY |
| hrv-78 | IPVCSLQSEA GATG.LVPIT VSISPMFAEF SGARN.AVV. ...QQGLPVM |
| ef173418-78 | IPVCSLQSEA GATG.LVPIT VSISPMFAEF SGARN.AVV. ...QQGLPVM |
| hrv-80 | IPVCPLEVAV GSEQ.YVPIT ISISPMCSEF SGARN..MV. ....QGLPVF |
| hrv-81 | IPICQLQSNN .TSN.IVPIT VSISPMFAEF SGARAKTVV. ....QGLPVY |
| hrv-81-f06 | IPICQLQSNN .TSN.IVPIT VSISPMFAEF SGARAKTVV. ....QGLPVY |
| hrv-81-f07 | IPICQLQSNN .TSN.IVPIT VSISPMFAEF SGARAKTVV. ....QGLPVY |
| hrv-82 | IPICPLETN. GGDA.TVPIT ISISPMFAEF SGARAR.... ...SQGLPVL |
| dq473509-82 | IPICPLETN. GGDV.TVPIT ISISPMFAEF SGARAR.... ...SQGLPVL |
| hrv-85 | IPISPLKSDT TATS.KVPIT ISISPMCAEF SGARAR...P VAAAQGLPVY |
| pico-85 | IPISPLKSDT TATS.KVPIT ISISPMCAEF SGARAR...P VAAAQGLPVY |
| dq473504-88 | IPICPLQVEM SGTQ.TVPIT VSISPMFSEF SGPRNKVVF. ...NQGFPVM |
| a10937-89 | IPICPLQVQP GGTQ.SIPIT VSISPMFSEF SGPRSKVVF. .STTQGLPVM |
| hrv-89 | IPICPLQVQP GGTQ.SIPIT VSISPMFSEF SGPRNKVVF. .STTQGLPVM |
| hrv-89-f08 | IPICPLQVQP GGTQ.SIPIT VSISPMFSEF SGPRNKVVF. .STTQGLPVM |
| hrv-89-f09 | IPICPLQVQP GGTQ.SIPIT VSISPMFSEF SGPRNKVVF. .STTQGLPVM |
| m16248-89 | IPICPLQVQP GGTQ.SIPIT VSISPMFSEF SGPRSKVVF. .STTQGLPVM |
| hrv-90 | IPICPLESMQ .VPN.TVPIT ISISPMCAEF SGARAR.... ...SQGLPVM |
| hrv-94 | IPICPLETQS .QDT.TVPIT ISISPMYAEF SGARAR.... ...SQGLPVL |
| ef173419-94 | IPICPLETQS .QDT.TVPIT ISISPMYAEF SGARAR.... ...SQGLPVL |
| hrv-95 | VPISQLR... GDTN.SIPIT ISISPMAAEF SGARNR.... SARIEGLPVM |
| hrv-96 | IPICRLNSM. GGEP.TVPIT ISISPMCAEF SGARAK.... ...NQGLPVL |
| hrv-98 | IPVSPLKSDQ .ASI.RVPIT ISISPMCAEF SGARAK...P TAAAQGLPVY |
| hrv-100 | IPISPLKSEP GASA.LVPIT ISISPMFAEF SGARAK...T IAAPQGLPVY |
| ef186077-qpm | IPICPLRAPA TAPS.TLPIT ISIAPIKSEF SGARQS.... .AKAQGLPVR |
| ef077279-nat001 | IPICPLRPPN PGQQ.TLPIT ISIAPIKSEF SGARQA...I KATAQGLPVR |
| ny1078 | IPICPLKTPS GAPR.TLPIT VSIAPDRSES SGARQS.... .ATRQGLPTR |
| ef582385-c024 | IPIVPLRAAN GVTK..VPIT ISIAPDKSEF SGARQS.... ..VKQGLPTR |
| ef077280-nat045 | IPIVPLKANT DAVN.SLPIT VTIAPDKSEF SGAMKS.... ..QQQGLPTR |
| ef582387-c026 | IPICPLRAPA TAPQ.TLPIT ISIAPIKSEF SGARQS.... ..TKQGLPVR |
| ef582386-c025 | IPLVPLRSGS TQTINRLPIT ISIAPDKSEF SGARQS.... .NKVQGLPVR |
| dq473485-03 | VPIAPLNAPT GSSP.TLPVT VTIAPMCTEF TGIRSRSIVP ....QGLPTT |
| ef173422-03 | VPIAPLNAPT GSSP.TLPVT VTIAPMCTEF TGIRSRSIVP ....QGLPTT |
| dq473490-04 | IPIVNITATS GAAP.SISIT VTIAPMYLEL SGIRSKTVI. ....QGLPTV |
| hrv-05 | IPIVDITATS GTTP.SIPVT ITIAPMFLEL SGIRSKAVI. ....QGLPAV |
| dq473486-06 | IPIAPLVAPT GSPQ.TLPVT VTIAPMCTEF TGIRSKTIVP ....QGLPTT |
| l05355-14 | IPIAPLTVPT GATP.SLPIT VTIAPMCTEF SGIRSKSIVP ....QGLPTT |
| k02121-14 | IPIAPLTVPT GATP.SLPIT VTIAPMCTEF SGIRSKSIVP ....QGLPTT |
| ef173420-17 | IPVVPLVNPV GMST.IIPIT VTIAPMYTEF SGIRSKAVVP ....QGLPTL |
| hrv-26 | IPIVGITATS GSAP.SIPVT VTIAPMFLEL SGIRSRTVI. ....QGLPTV |
| hrv-27 | IPVVPITANT GSPP.SIPVT VTIAPMNLEL SGIRSKTVV. ..KEQGLPTT |
| ef173421-27 | IPVVPITANT GSPP.SIPVT VTIAPMNLEL SGIRSKTVV. ..KEQGLPTT |
| dq473487-35 | IPIAPLAAPT GSAT.TLPIT VTIAPMFTEF TGIRSKTIVP NATPQGLPTT |
| hrv-35 | IPIAPLAAPT GSAT.TLPIT VTIAPMFTEF TGIRSKTIVP NATPQGLPTT |
| ef173423-37 | IPIAPLVAPT GSPQ.TLPVT VTIAPMCTEF TGIRSKTIVP ....QGLPTT |
| hrv-42 | IPIVQIAATT GAAP.SIPVT VTIAPMFLEL SGIRSKAVI. ....QGLPTV |
| dq473488-48 | IPIVPLAHPT GMTT.TIPIT VTIAPMCTEF SGIRSKAVAI ....QGLPTL |
| hrv-52 | IPIVPLSNPT GMTT.TIPVT VTIAPMYTEF SGIRSKAVVP ....QGLPTL |
| hrv-52-f10 | IPIVPLSSPS GMTT.TIPVT VTIAPMYTEF SGIRSKAVI. ...KQGLPTL |
| ef173424-52 | IPIVPLSNPT GMTT.TIPVT VTIAPMYTEF SGIRSKAVVP ....QGLPTL |
| hrv-69 | IPVVPLTNPT GMST.TIPIT VTIAPMNTEF SGIRSRAVVP ....QGLPTL |
| dq473489-70 | IPVVPLVNPV GMST.IIPVT VTIAPMYTEF SGIRSKAVVP ....QGLPTL |
| hrv-72 | IPIAPLIVPT NASP.TLPVT VTIAPMCTEF TGIRSKTVV. ...PQGLPTT |
| hrv-79 | IPISPLMAPT GNSQ.TLPIT VTIAPMCTEF TGIRSKTIVP NVSPQGLPVT |
| hrv-83 | IPIVPLSVPN GNQP.TLPIT VTIAPMCTEF SGIRSKTIVP NASPQGLPTT |
| hrv-84 | IPVIPITATS GAAH.SVPIT VTIAPMFLEL SGIRSMAVV. ...TQGLPTT |
| hrv-86 | IPISPLTAPT NSPN.TLPVT VTIAPMCAEF SGIRSRSIVP ....QGLPTT |
| hrv-91 | IPVVPLINPV GMST.IIPIT VTIAPMCTEF SGIRSQAV.. ..KIQGLPTL |
| hrv-92 | IPIVPLMAPT GNAT.TLPIT VTIAPMCTEF SGIRSKTIVP NATPQGLPTT |
| ef173425-93 | IPVVPITAST GSAP.SIPVT VTIAPMNPEL SGIRSKTVI. ..TPQGLPTT |
| hrv-97 | IPIVPITAST GSSH.SIPIT VTIAPMNLEL SGIRSKTVI. ...TQGLPTT |
| hrv-99 | IPVVNITATS GTSP.SIPVT VTIAPMFLEL SGIRSKAVI. ....QGLPTV |
| | 351 400 |
| annotation | .......... .......... .......... .....BBBBB BBBBBBBBKK |
| af499637-cva13 | STPGSNQYLT SDNFQSPCAL PEFDVTQPIF IPGEVKNLME LAEIDTMIPM |
| af546702-cva21 | NTPGSNQFLT SDDFQSPCAL PNFDVTPPIH IPGEVKNMME LAEIDTLIPM |
| v01149-pv1m | NTPGSNQYLT ADNFQSPCAL PEFDVTPPID IPGEVKNMME LAEIDTMIPF |
| d00239-01 | ITPGSGQFMT TDDMQSPCAL PWYHPTKEIS IPGEVKNLIE MCQVDTLIPV |
| pico-01 | ITPGSGQFMT TDDMQSPCAL PWYHPTKEIS IPGEVKNLIE MCQVDTLIPV |
| hrv-01 | ITPGSGQFMT TDDMQSPCAL PWYHPTKEIS IPGEVKNLIE MCQVDTLIPV |
| x02316-02 | ITPGSGQFLT TDDFQSPCAL PWYHPTKEIS IPGEVKNLVE ICQVDSLVPI |
| hrv-07 | LTPGSGQFLT TDDTQSPSAF PYFHPTKEIF IPGQVRNLIE MCQVDTLIPI |
| dq473503-07 | LTPGSGQFLT TDDTQSPSAF PYFHPTKEIF IPGQVRNLIE MCQVDTLIPI |
| hrv-08 | LTPGSGQFLT TDDMQSPSVL PYFHPTQEIF IPGEVKNLVE LCQVDTMVPL |
| pico-09 | TTPGSGQFMT TDDFQSPSAL PWFHPTKEIS IPGQVRNLIE MCQVDTIIPI |
| hrv-09 | TTPGSGQFMT TDDFQSPSAL PWFHPTKEIS IPGQVRNLIE MCQVDTIIPI |
| hrv-09-f01 | TTPGSGQFMT TDDFQSPSAL PWFHPTKEIS IPGQVRNLIE MCQVDTIIPI |
| hrv-09-f02 | TTPGSGQFMT TDDFQSPSAL PWFHPTKEIS IPGQVRNLIE MCQVDTIIPI |
| dq473498-10 | VTPGSGQFMT TDDLQSPSAL PWYHPTKEIL IPGEVKNLIE MCQVDSLIPI |
| hrv-10 | VTPGSGQFMT TDDLQSPSAL PWYHPTKEIL IPGEVKNLIE MCQVDSLIPI |
| ef173414-11 | ITPGSGQFMT TDDFQSPSAL PWFHPTKEIS IPGQVRNLIE LCQVDTLIPI |
| ef173415-12 | ITPGSGQFLT TDDAQSPSAL PYFHPTKEIF IPGQVKNLIE MCQVDTLIPV |
| hrv-13 | LTPGSGQFLT TDDFQSPSAL PWYHPTKEIS IPGQVRNLIE LCQVDTMIPI |
| hrv-13-f03 | LTPGSGQFLT TDDFQSPSAL PWYHPTKEIS IPGQVRNLIE LCQVDTMIPI |
| dq473493-15 | MTPGSGQFMT TDDYQSPSAL PWFHPTKEIS IPGEVKNLVE MCQVDTLIPI |
| l24917-16 | VTPGSGQFMT TDDMQSPCAL PWYHPTKEIF IPGEVKNLIE MCQVDTLIPI |
| hrv-18 | LTPGSGQFMT TDDFQSPCAL PWFHPTKEIS IPGQVRNLIE LCQVDTLIPI |
| hrv-19 | ITPGSGQFMT TDDYQSPSAL PWFHSTKEIS IPGQVRNLAE LCQVDTIIPI |
| hrv-20 | LTPGSAQFLT TDDAQSPSAL PYFHPTKEIF IPGKVNNLSE ICQVDSMIPI |
| hrv-21 | LTPGSGQFMT TDDFQSPSAL PWFHPTKEIS IPGQVTNLIE LCQVDTLIPV |
| hrv-22 | LTPGSGQFLT TDDYQSPSAL PWFHPTKEIF IPGQVRNLSE LCQVDTIIPI |
| dq473497-23 | ITPGSGQFLT TDDFQSPCAL PWYHPTKEIF IPGEVKNLVE ICQVDSLIPI |
| hrv-24 | ITPGSGQFLT TDDFQSPSAL PWFHPTKEIS IPGQVRNLVE LCQVDTLIPI |
| ef173416-24 | ITPGSGQFLT TDDFQSPSAL PWFHPTKEIS IPGQVRNLVE LCQVDTLIPI |
| hrv-25 | ITPGSGQFMT TDDFQSPSAL PWYHPTKEIL IPGEVKNLIE MCQVDTLIPI |
| dq473508-28 | LTPGSAQFLT TDDAQSPSAL PYFHPTKEIF IPGRVNNLSE ICQIDSMIPI |
| hrv-29 | MTPGSGQFMT TDDFQSPSAL PWYHPTKEIL IPGEVKNLIE ICQVDTLIPI |
| dq473512-30 | VTPGSGQFLT TDDYQSPCAL PWYHPTKEIF IPGEVKNLVE ICQVDSLIPI |
| hrv-30 | VTPGSGQFLT TDDYQSPCAL PWYHPTKEIF IPGEVKNLVE ICQVDSLIPI |
| hrv-31 | MTPGSGQFMT TDDFQSPSAL PWYHPTKEIL IPGEVKNLIE MCQVDTLIPI |
| hrv-32 | MTPGSGQFMT TDDFQSPSAL PWFHPTKEIS IPGQVRNLIE MCQVDTIIPI |
| hrv-33 | ITPGSGQFMT TDDFQSPSAL PWFHPTREIS IPGQVKNLVE LCQIDTLIPI |
| hrv-34 | LTPGSGQFMT TDDFQSPCAL PWYHPTKEIS IPGQVRNLIE LCQVDTLIPI |
| dq473501-34 | LTPGSGQFMT TDDFQSPCAL PWYHPTKEIS IPGQVRNLIE LCQVDTLIPI |
| dq473505-36 | LTPGSGQFLT TDDTQSPSAF PYFHPTKEIF IPGQVRNLIE MCQVDTLIPV |
| hrv-38 | MTPGSGQFMT TDDFQSPCAL PWFHPTKEIS IPGEVKNLIE LCQVDTMIPI |
| dq473495-38 | MTPGSGQFMT TDDFQSPCAL PWFHPTKEIS IPGEVKNLIE LCQVDTMIPI |
| ay751783-39 | MTPGSGQFLT TDDLQSPSAL PWYHPTKEIF IPGQVRNLIE MCQVDTMIPI |
| hrv-40 | LTPGSNQFMT TDDFQSPCAL PWYHPTKEIF IPGEVKNLIE MCQVDTLIPI |
| dq473491-41 | LTPGSGQFLT TDDYQSPSAL PWYHPTKEIS IPGQVQNLIE LCQVATMIPI |
| hrv-43 | LTPGSGQFMT TDDFQSPSAL PWYHPTKEIS IPGQVRNLIE MCEVDTLIPI |
| dq473499-44 | MTPGSGQFMT TDDFQSPSAL PWYHPTKEIL IPGEVKNLME ICQVDTLIPI |
| hrv-45 | LTPGSGQFLT TDDMQSPSVL PYFHSTQEIF IPGEVKNLIE LCQVDTMVPL |
| dq473506-46 | ITPGSAQFLT TDDTQSPSAL PYFHPTKEIF IPGEVKNLSE ICQVDSMIPI |
| hrv-47 | MTPGSGQFMT TDDFQSPSAL PWYHPTKEIL IPGEVRNLIE MCQVDTLIPI |
| dq473496-49 | ITPGSGQFLT TDDFQSPCAL PWYHPTKEIS IPGEVKNLVE ICQVDSLVPI |
| hrv-49-f04 | ITPGSGQFLT TDDFQSPCAL PWYHPTKEIS IPGEVKNLVE ICQVDSLVPI |
| hrv-50 | LTPGSGQFMT TDDFQSPCAL PWYHPTKEIS IPGQVRNLIE LCQVDTLIPI |
| hrv-51 | LTPGSAQFLT TDDTQSPSAL PYFHPTKEIF IPGKVSNLSE ICQVDSMIPV |
| dq473507-53 | LTPGSEQFLT TDDAQSPSAL PYFHPTKEIF IPGRVTNLSE ICQIDSMIPI |
| hrv-54 | VTPGSGQFMT TDDLQSPCAL PWYHPTKEIF IPGEVRNLIE MCQVDTLIPI |
| hrv-54-f05 | ITPGSGQFMT TDDLQSPCAL PWYHPTKEIF IPGEVRNLIE MCQVDTLIPI |
| dq473511-55 | TTPGSGQFMT TDDYQSPCAL PWFHSTKEIS IPGQVRNLIE LCQVDTLIPV |
| hrv-56 | VTPGSGQFMT TDDLQSPSAL PWYHPTKEIF IPGEVKNLIE MCQVGTLIPV |
| hrv-57 | VTPGSGQFMT TDDYQSPSAL PWFHPTKEIS IPGQVRNLIE MCQVDTLIPV |
| hrv-58 | LTPGSGQFLT TDDTQSPSAF PYFHPTKEIF IPGQVKNLIE MCQVDTLIPI |
| dq473500-59 | ITPGSGQFMT TDDLQSPSAL PWYHPTKEIF IPGEVKNLIE MCQVDTLIPI |
| hrv-60 | LTPGSGQFMT TDDFQSPCAL PWFHPTKEIS IPGEVKNLIE LCQVDSMIPI |
| hrv-61 | LTPGSGQFMT TDDFQSPSAL PWYHPTKEIS IPGQVRNLVE LCQVDTLIPI |
| hrv-62 | ITPGSGQFMT TDDFQSPSAL PWYHPTKEIL IPGEVKNLIE MCQVDTLIPI |
| hrv-63 | VTPGSGQFMT TDDLQSPSAL PWYHSTKEIF IPGEVKNLIE MCQVGTLIPV |
| hrv-64 | LTPGSGQFMT TDDYQSPSAL PWFHPTKEIF IPGQVQNLSE LCQVDTIIPI |
| ef173417-64 | LTPGSGQFMT TDDYQSPSAL PWFHPTKEIF IPGQVQNLSE LCQVDTIIPI |
| hrv-65 | LTPGSAQFLT TDDTQSPSAL PYFHSTKEIF IPGKVNNLSE ICQVDSMIPI |
| hrv-66 | ITPGSGQFMT TDDLQSPSAL PWYHPTKEIM IPGEVKNLIE MCQVDTLIPI |
| hrv-67 | TTPGSGQFMT TDDFQSPSAL PWFHPTKEIS IPGQVRNLIE ICQVDTLIPI |
| hrv-68 | LTPGSAQFLT TDDAQSPSAL PYFHPTKKIF IPGEVKNLSE ICQVDSMIPI |
| hrv-71 | LTPGSAQFLT TDDAQSPSAL PYFHPTKEIF IPGEVKNLSE ICQVDSIIPI |
| dq473492-73 | ITPGSGQFLT TDDFQSPSAL PWYHPTKEIS IPGQVRNLVE LCQVDTMIPI |
| dq473494-74 | MTPGSGQFMT TDDFQSPSAL PWFHPTKEIS IPGQVRNLVE MCQVDTLIPI |
| dq473510-75 | LTPGSGQFMT TDDFQSPSAL PWYHPTKEIS IPGQVRNLIE LCEVDTLIPI |
| dq473502-76 | ITPGSGQFMT TDDFQSPSAL PWFHPTREIS IPGQVKNFVE LCQIDTLIPI |
| hrv-76 | ITPGSGQFMT TDDFQSPSAL PWFHPTREIS IPGQVKNLVE LCQIDTLIPI |
| hrv-77 | ITPGSGQFMT TDDLQSPSAL PWYHPTKEIM IPGEVKNLIE MCQVDTLIPI |
| hrv-78 | LTPGSEQFLT TDDNQSPSAL PWFHPSKEIF IPGRVTNLAE ICQVDTLIPV |
| ef173418-78 | LTPGSEQFLT TDDNQSPSAL PWFHPSKEIF IPGRVTNLAE ICQVDTLIPV |
| hrv-80 | LTPGSAQFLT TDDTQSPSAL PYFHPTKEIF IPGEVKNLSE ICQVDSMIPV |
| hrv-81 | VTPGSGQFMT TDDMQSPCAL PWYHPTKEIF IPGEVKNLIE MCQVDTLIPI |
| hrv-81-f06 | VTPGSGQFMT TDDMQSPCAL PWYHPTKEIF IPGEVKNLIE MCQVDTLIPI |
| hrv-81-f07 | VTPGSGQFMT TDDMQSPCAL PWYHPTKEIF IPGEVKNLIE MCQVDTLIPI |
| hrv-82 | MTPGSGQFMT TDDYQSPSAL PWFRSTKEIF IPGQVHNLAE LCQVDTIIPI |
| dq473509-82 | MTPGSGQFMT TDDYQSPSAL PWFHSTKEIF IPGQVHNLAE LCQVDTIIPI |
| hrv-85 | LTPGSNQFMT TDDFQSPCAL PWYHPTKEIF IPGEVKNLIE MCQVDTLIPI |
| pico-85 | LTPGSNQFMT TDDFQSPCAL PWYHPTKEIF IPGEVKNLIE MCQVDTLIPI |
| dq473504-88 | LTPGSGQFLT TDDMQSPSAF PYFHPTKEIF IPGEVKNLVE MCQVDTLIPV |
| a10937-89 | LTPGSGQFLT TDDTQSPSAF PYFHPTKEIF IPGQVRNLIE MCQVDTLIPV |
| hrv-89 | LTPGSGQFLT TDDTQSPSAF PYFHPTKEIF IPGQVRNLIE MCQVXTLIPV |
| hrv-89-f08 | LTPGSGQFLT TDDTQSPSAF PYFHPTKEIF IPGQVRNLIE MCQVDTLIPV |
| hrv-89-f09 | LTPGSGQFLT TDDTQSPSAF PYFHPTKEIF IPGQVRNLIE MCQVDTLIPV |
| m16248-89 | LTPGSGQFLT TDDTQSPSAF PYFHPTKEIF IPGQVRNLIE MCQVDTLIPV |
| hrv-90 | ITPGSGQFLT TDDFQSPSAL PWFHPTKEIS IPGQVRNLVE LCQVDTLIPI |
| hrv-94 | MTPGSGQFMT TDDYQSPSAL PWFHPTKEIF IPGQVQNLSE LCQVDTIIPI |
| ef173419-94 | MTPGSGQFMT TDDYQSPSAL PWFHPTKEIF IPGQVQNLSE LCQVDTIIPI |
| hrv-95 | LTPGSGQFLT TDDMQSPSVL PYFHPTQEIF IPGEVKNLVE LCQVDTMVPL |
| hrv-96 | LTPGSGQFMT TDDFQSPSAL PWYHPTKEIS IPGQVRNLIE LCQVDTLIPI |
| hrv-98 | VTPGSGQFMT TDDLQSPCAL PWYHPTKEIF IPGEVKNLIE MCQVDTLIPV |
| hrv-100 | ITPGSGQFLT TDDLQSPSAL PWYHPTKEIL IPGEVKNLIE MCQVDTLIPI |
| ef186077-qpm | MPSGANQFMT TEDEQSPNIL PSFHSTKQIH IPGEIKTIMD MARVDSFMPI |
| ef077279-nat001 | MPSGANQFMT TEDEQSPNVL PGFHPTKQIH IPGEIKTIMD IARVDSFMPI |
| ny1078 | MPSGANQFMT TEDEQSGNIL PNFSPTKQIH IPGQIKTIMD MARVDSFMPI |
| ef582385-c024 | LPSGSQQFLT TEDEQSANLL PDFSVTKIID IPGRITNILH MAMVDSFMPL |
| ef077280-nat045 | SPAGSQQFMT TEDEQSPNIL PEYSPTKMIH IPGRIDNILH IAMVESLIPL |
| ef582387-c026 | MPSGANQFMT TEDEQSPNIL PSFHSTKQIH IPGQIKTIMD MARVDSFMPI |
| ef582386-c025 | MPSGAQQFMT TEDEQSANLL PGFHPTPIMH IPGEITNIMH MARVDSFMPI |
| dq473485-03 | TLPGSGQFLT TDDRQSPSAL PSYEPTPRIH IPGKVRNLLE IIQVGTLIPM |
| et173422-03 | TLPGSGQFLT TDDRQSPSAL PSYEPTPRIH IPGKVRNLLE IIQVGTLIPM |
| dq473490-04 | LTPGSEQFLT TDDRQSPSAM PNYEPTPLIH IPGEVRNLLE IAQVDTLIPI |
| hrv-05 | LTPGSEQFLT TDDRQSPSAM PNYEPTPLIH IPGEVKNLLE IAQVDTLIPL |
| dq473486-06 | TLPGSGQFLT TDDRQSPSAL PNYEPTPRIH IPGKVRNLLE IIQVDTLIPM |
| l05355-14 | TLPGSGQFLT TDDRQSPSAL PNYEPTPRIH IPGKVHNLLE IIQVDTLIPM |
| k02121-14 | TLPGSGQFLT TDDRQSPSAL PNYEPTPRIH ILGKVHNLLE IIQVDTLIPM |
| ef173420-17 | TTPGSGQFLT TDDRQSPSAM PNYEPTPLIH IPGEVHNLLE IIQVDTLIPM |
| hrv-26 | LTPGSEQFLT TDDRQSPSAM PNYEPTPLIH IPGEVNNLLE MAQVDTLIPI |
| hrv-27 | LTPGSEQFLT TDDRQSPSAL PNYEPTPLIH IPGRVTNLLE LVQVDTMIPI |
| ef173421-27 | LTPGSEQFLT TDDRQSPSAL PNYEPTPLIH IPGRVTNLLE LVQVDTMIPI |
| dq473487-35 | TLPGSGQFLT TDDRQSPSAL PNYEPTPKIH IPGEVKNLLE IIQVDTLIPM |
| hrv-35 | TLPGSGQFLT TDDRQSPSAL PNYEPTPKIH IPGEVKNLLE IIQVDTLIPM |
| ef173423-37 | TLPGSGQFLT TDDRQSPSAL PSYEPTPRIH IPGKVENLLE IIQVDTLIPM |
| hrv-42 | LTPGSEQFLT TDDRQSPSAM PNYEPTPLIH IPGEVKNLLE IAQVDTLIPI |
| dq473488-48 | TTPGSGQFLT TDDRQSPSAM PNYEPTPPIH IPGEVHNLLE IIQVDTLIPM |
| hrv-52 | TTPGSGQFLT TDDRQSPSAM PNYEPTPQIH IPGEVHNLLE LIQVDTLIPL |
| hrv-52-f10 | TTPGSGQFLT TDDRQSPSAM PNYEPTPQIH IPGEVHNLLE LIQVDTLIPL |
| ef173424-52 | TTPGSGQFLT TDDRQSPSAM PNYEPTPQIH IPGEVHNLLE LIQVDTLIPL |
| hrv-69 | TTPGSGQFLT TDDRQSPSAM PNYEPTPPIH IPGEVHNLLE IIQVDTLIPM |
| dq473489-70 | TTPGSGQFLT TDDRQSPSAM PNYEPTPLIH IPGEVHNLLE IIQVDTLIPM |
| hrv-72 | TLPGSGQFLT TDDRQSPSAL PNYEPTPKIH IPGQVKNLLE IIQVDTLIPM |
| hrv-79 | TLPGSGQFLT TDDRQSPSAL PNYEPTPRIH IPGKVRNLLE IIQVDTLIPM |
| hrv-83 | TLPGSGQFLT TDDRQSPSAL PNYEPTPRIH IPGQVRNLLE IIQVDTMIPM |
| hrv-84 | STPGSNQFLT TDDRQSPSAL PNYEVTPLIH IPGRVVNLLE IAQVDSLIPI |
| hrv-86 | TLPGSGQFLT TDDRQSPSAL PCYEPTPKIH IPGEVKNLLE MIQVDTLIPM |
| hrv-91 | TTPGSGQFLT TDDRQSPSAM PNYEPTPPIH IPGEVHNLLE IIQVDTLIPM |
| hrv-92 | TLPGSGQFLT TDDRQSPSAL PNYEPTPRIH IPGQVKNLLE IIQVDTLIPM |
| ef173425-93 | LTPGSEQFLT TDDRQSPSAL PNYEPTPLIH IPGRVTNLLE LIQVDTMIPI |
| hrv-97 | LTPGSEQFLT TDDRQSPSAL PNYEPTPLIH IPGRVTNLLE IIQVDSMIPI |
| hrv-99 | LTPGSEQFLT TDDRQSPSAM PNYEPTPLIH IPGEVKNLLE IAQVDTLIPI |
| | 401 450 |
| annotation | KKKKKK..KK KKKKK..... .......... BBCBBHHHHH H.HHAHHHHH |
| af499637-cva13 | DLSEGK.RNS MDMYRVKISD AGDR..NKPI LCLTLSPASD PRLSYTMLGE |
| af546702-cva21 | NAVDGK.VNT MEMYQIPLND NLSK...API FCLSLSPASD KRLSHTMLGE |
| v01149-pv1m | DLSATK.KNT MEMYRVRLSD KPHT..DDPI LCLSLSPASD PRLSHTMLGE |
| d00239-01 | NNVGTN.VGN ISMYTVQLGN QMDM..AQEV FAIKVDITSQ P.LATTLIGE |
| pico-01 | NNVGNN.VGN VSMYTVQLGN QTGM..AQKV FSIKVDITSQ P.LATTLIGE |
| hrv-01 | NNVGNN.VGN VSMYTVQLGN QTGM..AQKV FSIKVDITSQ P.LATTLIGE |
| x02316-02 | NNTDTY.INS ENMYSVVLQS SINA..PDKI FSIRTDVASQ P.LATTLIGE |
| hrv-07 | NNTGNN.VRS ANMYTVDLTT QDHP.YAQEV FAIPVDVASH P.LATTYLGE |
| dq473503-07 | NNTGNN.VRS ANMYTVDLTT QDHP.YAQEV FAIPVDVASH P.LATTYLGE |
| hrv-08 | NNINAS.RNR IDMYALPLTR QPQS..AVKL FTIPIDIASP P.LNTTLLGE |
| pico-09 | NNTGTN.TTS INMYTVQLER QADL..MTEV FAINVDIASH P.LATTMLGE |
| hrv-09 | NNTGTN.TTS INMYTVQVER QADL..MSEV FAINVDIASH P.LATTMLGE |
| hrv-09-f01 | NNTGTN.TTS INMYTVQLER TADL..MSEV FAINVDIASH P.LATTMLGE |
| hrv-09-f02 | NNTGTN.TTS INMYTVQLER TADL..MSEV FAINVDIASH P.LATTMLGE |
| dq473498-10 | NNTTAN.LRK VNMYTIQLAN QTNM..AEEI FAIKVDIASQ P.LSNTIIGE |
| hrv-10 | NNTTAN.LRK VNMYTIQLAN QTNM..AEEI FAIKVDIASQ P.LSNTIIGE |
| ef173414-11 | NSVEGN.TDN TSIYTVTLTR ETNL..AQEI FAIKVDIASH P.LATTLIGE |
| ef173415-12 | NNVQAS.KNN ISMYTVQLTT QTDV..AKEV FAIPVDVASQ P.LATTMLGE |
| hrv-13 | NNTNDN.IRD KSMYTIRLGG VTNA..KEAI FAMRVDIASQ P.LATTMIGE |
| hrv-13-f03 | NNTNDT.IRD KSMYTIRLGG VTNA..KEAI FAMRVDIASQ P.LATTMIGE |
| dq473493-15 | NNTPGN.VNT INMYTVLLER KDDL..MQEV FSIRVDIASQ P.LATTMIGE |
| l24917-16 | NSTQSN.IGN VSMYTVTLSP QTKL..AEEI FAIKVDIASH P.LATTLIGE |
| hrv-18 | NNLQAN.ITN LDMYSVVLNR EIDP..AKEV FAIKVDIASQ P.LATTLIGE |
| hrv-19 | NHTTST.TSS VNMYTVVLDK KTSL..AEEV FAIKVDIASQ P.LATTLIGE |
| hrv-20 | NNTIAV.KNS AGMYTVQVSQ QTQP..AQEI FSILVDVASQ P.IATTLIGE |
| hrv-21 | NNTETNGVTN INMYTVTINR EVNITPAKEI FAIKVDIASQ P.LATTLIGE |
| hrv-22 | NHTTST.TSS VNMYTIQLTK QQPG...TEV FAMRVDVASQ P.LATTLIGE |
| dq473497-23 | NNLEGN.ITS EAMYSIELQS STEQ..SK.I FSIRTDIASQ P.LATTLIGE |
| hrv-24 | DSVEAN.IKS TNMYTVTLTR ETDS..AKEI FAIKVDIASH P.LATTLIGE |
| ef173416-24 | DSVEAN.IKS TNMYTVTLTR ETDS..AKEI FAIKVDIASH P.LATTLIGE |
| hrv-25 | NNTNNN.LRK VNLYTVELTN QPMP..AQKI FSIKVDIASQ P.LVNTMLGQ |
| dq473508-28 | NNTHAV.KNT VNMYTVEVRS QTSL..AAEV FAIPADIASQ P.LATTLIGE |
| hrv-29 | NNVSSN.LRK VNLYTVQLTS QTTP..AQQV FAIKVDIASQ P.LANTMLGQ |
| dq473512-30 | NNTEDN.ITS EAMYSIKLQS SVDQ...DKI FSLRTDIASQ P.LATTLIGE |
| hrv-30 | NNTEDN.ITS EAMYSIKLQS SVDQ...DKI FSLRTDIASQ P.LATTLIGE |
| hrv-31 | NNTMQN.LRK VNMYTIQLSS QTEM..AQEI FAIKVDIASQ P.LANTMLGE |
| hrv-32 | NNTGNN.TTS INMYTVRLER QTNL..MGEV FAINVDIASH P.LATTLLGE |
| hrv-33 | NSTTAN.NDN TSIYTVTLEK QTNL..AQEV FAIKVDIASN P.LATTLIGE |
| hrv-34 | NNLQQN.ISN TDMYSVVLNN ETEL..AKEI FAIRVDIASQ P.LATTLLGE |
| dq473501-34 | NNLQQN.ISN TDMYSVVLNN ETEL..AKEI FAIRVDIASQ P.LATTLLGE |
| dq473505-36 | NNKEEN.VKS VNMYTVDLRT QTEL..AKEV FSIPVDVASQ P.LATTLIGE |
| hrv-38 | NNVGNN.TKS VDMYTVVLQR QDQL..MQEV FAIRVDVASQ P.LATTLIGE |
| dq473495-38 | NNVGNN.TKS VDMYTVVLQR QDQL..MQEV FAIRVDVASQ P.LATTLIGE |
| ay751783-39 | NNTNER.IGN VNMYTVSLTS QTNT..AEQI FAIKVDIASQ P.LSSTLIGE |
| hrv-40 | NNTMPN.LRN INKYTVQLTS QMDL..AQEI FALKVDVASQ P.LSSTLLGE |
| dq473491-41 | NNTNTN.IRD KSMYTIRLGG ETDI..KEAI FAMRVDIASQ P.LATTLIGE |
| hrv-43 | NNVGTN.VKN VNMYTVLLER QDNL..AQEI FAIRVDIASQ P.LATTLIGE |
| dq473499-44 | NNVNNN.LRK VNLYTVQLTS QTTP..AQQV FAIKVDIASQ P.LANTMLGQ |
| hrv-45 | NNLHIN.KNK IGMYALPLTR QNTP..AAEL FAMPVDITSS P.LATTLLGE |
| dq473506-46 | NNVEQH.KNS VDMYSVVLTK QTNP..AEEI FAIPVDVASQ P.LATTLIGE |
| hrv-47 | NNTAQN.LRK VNMYTIQLSN QTEM..AQEI FAIKVDIASQ P.LASTMLGE |
| dq473496-49 | NNTENN.ITN ENMYSVVLQS TVGE..PDKI FSIKTDVASQ P.LATTLIGE |
| hrv-49-f04 | NNTENN.ITN GDMYSVILQS TIGE..PDKI FSIKTDVASQ P.LATTLIGE |
| hrv-50 | NNLEHN.TTN INMYSVVLSN ETEM..AKEI FAIKVDIASQ P.LATTLIGE |
| hrv-51 | NNTTPV.NNS IGMYTVRVEV QTDF..KKEI FAIPVDVASQ P.LSTTLIGE |
| dq473507-53 | NNTHGV.KNT VNMYTVQVQE QTTP..AKEV FAIPVDVASQ P.LATTLIGE |
| hrv-54 | NNTFAN.LRN VNKYAVSLFS QTDF..AKEI FAIKVDVASQ P.LSSTLLGE |
| hrv-54-f05 | NNTLPN.LRN VSKYAVSLSS QTDF..AKEI FAIKVDVASQ P.LSSTLLGE |
| dq473511-55 | NNVEGN.EKR IDMYTVTLSR ETDV..AKEI LAIRVDIASQ P.LATTMIGE |
| hrv-56 | NNTDAN.LRN INKYTVQLSS QTDL..AKEI FAIKVDVASQ P.LSSTLLGE |
| hrv-57 | NNLEQN.IRK VDMYSVILGQ ETTP..AKEI FAIKVDIASQ P.LATTMIGE |
| hrv-58 | NNVGEN.VKS VNMYTVDLRS QTEL..AQEV FAIPVDIASQ P.LATTLIGE |
| dq473500-59 | NNTASN.IRN VSMYTVQLTS QVNL..AQEI FAIKVDVASQ P.LSSTLLGE |
| hrv-60 | NNVADK.IRS VDMYTVVLQR QDEL..MQEV FAIRVDVASQ P.LATTLIGE |
| hrv-61 | NNTEAN.IRN KNMYTVQLGG EPDP..TTPV FTIRVDIASQ P.LATTLIGE |
| hrv-62 | NNTDNN.LRK VNLYTVELTN QPTP..AQKI FSIKVDIASQ P.LANTMLGQ |
| hrv-63 | NNTNAN.IKN VSMYTVQLTS QTDL..AQEI FAIKVDVASQ P.LSSTLLGE |
| hrv-64 | NNTTAN.TTS VNMYTLQLTK QSPG...HEV FAMKVDIASQ P.LATTMIGE |
| ef173417-64 | NNTTAN.TTS VNMYTLQLTK QSPG...HEV FAMKVDIASQ P.LATTMIGE |
| hrv-65 | NNTIPM.NNK IGMYTVEVGV QTEL..KTEI FAIPVDVASQ P.LATTLIGE |
| hrv-66 | NNTQAN.LKK INIYTIQLSN QPKM..AEEI FAIKVDIASQ P.LSSTLLGQ |
| hrv-67 | NNTGTN.TTS INMYTVQLQR QAEL..MQEI FAINVDIASH P.LATTLLGE |
| hrv-68 | NNTPTA.RNS TNMYTVQVGQ QTKV..AQEV FSILVDVASQ P.LATTLIGE |
| hrv-71 | NNVEAR.KNS ISMYTVEVGV KTTL..AEEV FAIPVDVASQ P.LATTLIGE |
| dq473492-73 | NNIAAN.VTN ESMYAISLES NADI..KQAV FAMRVDITSQ P.LATTLIGE |
| dq473494-74 | NNTAGN.VNN VNMYTVLLER KPDL..MQEV FAIKVDIASQ P.LATTMIGE |
| dq473510-75 | NNTSEN.LKT TNMYTVYLER RSDL..AQEI FAIRVDIASQ P.LATTLIGE |
| dq473502-76 | NSVTGN.TNN TSIYTVTLTR ETSL..AQEI FAIKVDIASD P.LATTLIGE |
| hrv-76 | NSVTGN.TNN TSIYTVTLTR ETSL..AQEI FAIKVDIASD P.LATTLIGE |
| hrv-77 | NNTQEN.LKK VNVYTIQLTN QLKM..AEEI FAIKVDIASQ P.LSNTMLGQ |
| hrv-78 | NNVQAS.KNN VSMYTVMLST QTQT..AQEI FAIPVDVASQ P.LATTLIGE |
| ef173418-78 | NNVQAS.KNN VSMYTVMLST QTQT..AQEI FAIPVDVASQ P.LATTLIGE |
| hrv-80 | NNVQGN.KNS VNMYSIILDK QTTS..AGEV FAIPVDIASQ P.LATTLIGE |
| hrv-81 | NSTRTN.IGN VNMYTVTLQP QTDM..ATEV FAIKVDIASH P.LATTLIGE |
| hrv-81-f06 | NSTRAN.IGN VNMYTVTLQP QTDM..ATEV FAIKVDIASH P.LATTLIGE |
| hrv-81-f07 | NSTRAN.IGN VNMYTVTLQP QTDM..ATEV FAIKVDIASH P.LATTLIGE |
| hrv-82 | NYTSAN.TTS VNMYTVVLDK GDPG...REV FAMRADIATH P.LATTLIGE |
| dq473509-82 | NYTTAN.TTS VNMYTVVLQK ENPG...TEV FAMRVDIATQ P.LATTLIGE |
| hrv-85 | NNTSQN.LRN INKYTVQLTS QVNL..AQEI FAIKVDVASQ P.LSSTLLGE |
| pico-85 | NNTSQN.LRN INKYTVQLTS QVNL..AQEI FAIKVDVASQ P.LSSTLLGE |
| dq473504-88 | NNTEGN.VKS ANMYTVHLAT QDNH..AQEV FSIPVDVASQ P.LATTYLGE |
| a10937-89 | NNTQEN.VRS VNMYTVDLRT QVDL..AKEV FSIPVDIASQ P.LATTLIGE |
| hrv-89 | NNTQEN.VRS VNMYTVDLRT QVDL..AKEV FSIPVDIASQ P.LATTLIGE |
| hrv-89-f08 | NNTQEN.VRS VNMYTVDLRT QVDL..AKEV FSIPVDIASQ P.LATTLIGE |
| hrv-89-f09 | NNTQEN.VRS VNMYTVDLRT QVDL..AKEV FSIPVDIASQ P.LATTLIGE |
| m16248-89 | NNTQEN.VRS VNMYTVDLRT QVDL..AKEV FSIPVDIASQ P.LATTLIGE |
| hrv-90 | DSVEAN.AKN TSMYTVTLSR ETEL..AKEI FAIKVDIASH P.LATTLIGE |
| hrv-94 | NNISSN.TTS VNMYSLVLTK ERPG...HEV FAMKVDIASQ P.LATTIIGE |
| ef173419-94 | NNISSN.TTS VNMYSLVLTK ERPG...HEV FAMKVDIASQ P.LATTIIGE |
| hrv-95 | NNINAS.RNR IDMYALPLTR QPQS..AVKL FTIPIDIASP P.LNTTLLGE |
| hrv-96 | HNTATN.AKN INMYTVQLGG EPNP..KTPV FTIRVDIASQ P.LATTLIGE |
| hrv-98 | NNTIAN.LRN VNKYAVSLSS QTDF..AKEI FAIKVDVASQ P.LSSTLLGE |
| hrv-100 | NNTIAN.LRK VNMYTIQLTN QTEM..AKEI FAIKVDIASQ P.LSSTMIGE |
| ef186077-qpm | NNVNQS..HT LGVYYITISN VSSE...RKI LAIPLDMSNT L.FSTTLMGE |
| ef077279-nat001 | NNIPTM.INS IGAYNIPITG GHDN...KRI VVIPLDTSNT L.FSSTLLGE |
| ny1078 | NNLQSQ.LQD VGVYNITLTG TSNN....RI LAIPLDMSNT L.FSTTLMGE |
| ef582385-c024 | NNIETN.VGQ ISIYNVQVTK KTAD...KPI VVIPMDISNT L.FSTTLLGE |
| ef077280-nat045 | NNIPGQ.VGT VGMYNVTIAS KTAD..QDMI LAIPLQMDNT L.FATTLVGE |
| ef582387-c026 | NNVNQS..QA IGIYYIPISN THNN...RRI LAIPLDMSNT L.FSTTLLGE |
| ef582386-c025 | NNITDQ.KID VPIYSRTVTA RPASNSSDLI LAIPLDMNNT L.FSTTLLGE |
| dg473485-03 | NNTGTN..DN VTNYLIPLHA DRQN...EQI FGTKLYIGDG V.FKTTLLGE |
| ef173422-03 | NNTGTN..DN VTNYLIPLHA DRQN...EQI FGTKLYIGDG V.FKTTLLGE |
| dq473490-04 | NN.AEG.ITG LETYRIPLYQ NRQG...QQV FGFRLYLGDG V.LKTTMLGE |
| hrv-05 | NNTTNT..TG LGMYRIPLVQ NMQG...EQV FGFRLYLGDG V.LKTTLLGE |
| dq473486-06 | NNVHTS..DE VNSYLIPLTA NRQN...DQI FGTKLFIGDG V.FKTTLLGE |
| l05355-14 | NNTHTK..DE VNSYLIPLNA NRQN...EQV FGTNLFIGDG V.FKTTLLGE |
| k02121-14 | NNTHTK..DE VNSYLIPLNA NRQN...EQV FGTNLFIGDG V.FKTTLLGE |
| ef173420-17 | NNKGAT..DS LEEYRIPLTV NKKN...DQI FGTRLFIGDG V.FKTTLFGE |
| hrv-26 | NNAKDV..VG LGMYRIPLVQ NRQE...TQV FGFRLFLGDG V.LKTTLLGE |
| hrv-27 | NNVTDL..DT IEKYRIPLMQ NQQE...QQV FGFSLFLGGG V.LKTTLLGE |
| ef173421-27 | NNVTDL..DT IEKYRIPLMQ NQQE...QQV FGFSLFLGGG V.LKTTLLGE |
| dq473487-35 | NNTHTK..DE VKSYLIPLVA NQQN...QKI FGTDLYIGDG V.FKTTLLGE |
| hrv-35 | NNTHTK..DE VKSYLIPLVA NQQN...QKI FGTDLYIGDG V.FKTTLLGE |
| ef173423-37 | NNLQGS..DE VSNYLIPLTA NKQN...GQI FGTKLFIGDG V.FKTTLLGE |
| hrv-42 | NNTETA..SG LDMYRVPLTQ NKQG...EQV FGFKLYLGDG V.LKTTLIGE |
| dq473488-48 | NNTHTT..DV MDEYRIPLTV GRVN...DQV FGTRMFIGDG V.FKTTLFGE |
| hrv-52 | NNLGTT..DS MSEYRIPLTA GKVN...EQI FGTRLYIGDG V.FKTTLFGE |
| hrv-52-f10 | NNLGVT..DT MSEYRIPLTA GRVN...EQI FGTRLYIGDG V.FKTTLFGE |
| ef173424-52 | NNLGTT..DS MSEYRIPLTA GKVN...EQI FGTRLYIGDG V.FKTTLFGE |
| hrv-69 | NNIGAR..DT MDEYRIPLEV NKVN...EQI FGTRLFIGDG V.FKTTLFGE |
| dq473489-70 | NNKGAT..DT LDEYRIPLTV NKKN...DQI FGTRLFIGDG V.FKTTLFGE |
| hrv-72 | NNTHNK..DA VKSYLIPLQP NRQG...EMV FGTKLFIGDG V.FKTTLLGE |
| hrv-79 | NNIYNK..DK FNSYLIPLTA NQQN...TQI FGTNLFIGDG V.FKTTLLGE |
| hrv-83 | NKTKVN..DE VGNYLIPLIQ GQKN...EQI FGTNLYIGDG V.FKTTLLGE |
| hrv-84 | NNIANN..DN LERYRIPLTP NVQE...TQV FGFSLFLGGT V.LKTTLLGE |
| hrv-86 | NNTTAT..DE VGNYLIPLNV NKQN...EQI FGTNLFIGDG V.FKTTLLGE |
| hrv-91 | NNKGTT..DT LEEYRIPLTV DKKD...GQI FGTRLFIGDG V.FKTTLFGE |
| hrv-92 | NNTKTK..DE VDSYLIPLTQ GLKN...AQI FGTNLYIGDG V.FKTTLLGE |
| ef173425-93 | NNVTEL..DT IDKYRVPLIQ GQQE...QQV FGFSLFLGGK V.LKTTLLGE |
| hrv-97 | NNITLP..DG VEKYRVPLMQ NQQE...SQV FGFSLFLGGD V.LKTTLLGE |
| hrv-99 | NNTKTA..TG LDMYRIPLMQ NKQG...EQV FGFRLYLGDG V.LKTTLLGE |
| | 451 500 |
| annotation | HHHHHBBBBB BBDBBBBBB. ....BBBEBB BBB....... .HHHBHHHHB |
| af499637-cva13 | ILNYYTHWAG SLKFSFLFCG SMMATGKLLV AYSPPGAQPP QDRKAAMLGT |
| af546702-cva21 | ILNYYTHWTG SIRFTFLFCG SMMATGKLLL SYSPPGAKPP TNRKDAMLGT |
| v01149-pv1m | ILNYYTHWAG SLKFTFLFCG FMMATGKLLV SYAPPGADPP KKRKEAMLGT |
| d00239-01 | IASYYTHWTG SLRFSFMFCG TANTTLKLLL AYTPPGIDKP ATRKDAMLGT |
| pico-01 | IASYYTHWTG SLRFSFMFCG TANTTLKLLL AYTPPGIDEP TTRKDAMLGT |
| hrv-01 | IASYYTHWTG SLRFSFMFCG TANTTLKLLL AYTPPGIDEP TTRKDAMLGT |
| x02316-02 | ISSYFTHWTG SLRFSFMFCG TANTTVKLLL AYTPPGIAEP TTRKDAMLGT |
| hrv-07 | MSSYFTHWTG SLRFSFMFCG SACTTLKLLI AYTPPGIAKP TSRKEAMLGT |
| dq473503-07 | MSSCFTHWTG SLRFSFMFCG SACTTLKLLI AYTPPGIAKP TSRKEAMLGT |
| hrv-08 | IASYYTHWTG SIRLSFMFCG SANSSLKLLI AYTPPGAPEP TKRKEAMLGT |
| pico-09 | IASYYTHWTG SLRFSFMFCG SASSTLKLLL AYTPPGIAKP TSRRDAMLGT |
| hrv-09 | IASYYTHWTG SLRFSFMFCG SASSTLKLLL AYTPPGIAKP TSRRDAMLGT |
| hrv-09-f01 | IASYYTHWTG SLRFSFMFCG SASTTLKLLL AYTPPGIAKP ISRRDAMLGT |
| hrv-09-f02 | IASYYTHWTG SLRFSFMFCG SASTTLKLLL AYTPPGIAKP TSRRDAMLGT |
| dq473498-10 | IASYFTHWTG SLRFSFMFCG TANTTLKLLL AYTPPGIKKP TNRKQAMLGT |
| hrv-10 | IASYFTHWTG SLRFSFMFCG TANTTLKLLL AYTPPGIKKP TNRKQAMLGT |
| ef173414-11 | IASYYTHWTG SIRFSFLFCG TANTTLKLLI AYTPPGISKP TSRKEAMLGT |
| ef173415-12 | LSSYFTHWTG SLRFSFMFCG TANTTLKLLI AYTPPGVPKP DTRKKAMLGT |
| hrv-13 | ISSYYTHWTG SLRFSFMFCG SAFTTLKLLI AYTPPGITVP ENRKKAMLGT |
| hrv-13-f03 | ISSYYTHWTG SLRFSFMFCG SAFTTLKLLI AYTPPGITVP ENRKKAMLGT |
| dq473493-15 | IASYYTHWTG SLRFSFMFCG TANTTLKLLL AYTPPGIAKP SNRKEAMLGT |
| 124917-16 | IASYFTHWTG SLRFSFMFCG TANTTLKVLL AYTPPGIGKP RSRKEAMLGT |
| hrv-18 | ISSYYTHWTG SLRFSFLFCG SANTTLKLLV AYTPPGIAKP ADRKAAMLGT |
| hrv-19 | MSSYYTHWTG SLRFSFMFCG TAGTTLKLLL AYTPPGIAKP QKRKDAMLGT |
| hrv-20 | IASYYTHWTG SLRFSFMFCG TANTSLKLLI AYTPPGVPKP ETRQKAMLST |
| hrv-21 | IANYYTHWTG SIRFSFLFCG TANTTLKLLV AYTPPGIKKP ENRKDAMLGT |
| hrv-22 | ISSYFTNWTG SLRFSLMFCG SAGTTLKMLV AYTPPGIAKP ETRKDAMLGT |
| dq473497-23 | ISSYFTHWTG SLRFSFMFCG TANTTVKLLL AYTPPGIAEP TTRKNAMLGT |
| hrv-24 | IASYYTHWTG SLRFSFLFCG TACTTLKLLI AYTPPGIRKP ENRREAMLGT |
| ef173416-24 | IASYYTHWTG SLRFSFLFCG TACTTLKLLI AYTPPGIRKP ENRREAMLGT |
| hrv-25 | IASYFTHWTG SLRFSFMFCG TANTTLKLLL AYTPPGIGEP QDRKQAMLGT |
| dq473508-28 | IASYYTHWTG SLRFSFMFCG TANTSLKLLI AYTPPGVPKP DSRQKAMLST |
| hrv-29 | IASYFTHWTG SLRFSFMFCG TANTTLKLLL AYTPPGIGKP ETRKQAMLGT |
| dq473512-30 | ISNYFTHWTG SLRFSFMFCG TANTTVKLLL AYTPPGIAEP TTRKDAMLGT |
| hrv-30 | ISNYFTHWTG SLRFSFMFCG TANTTVKLLL AYTPPGIAEP TTRKDAMLGT |
| hrv-31 | IASYFTHWTG SLRFSFMFCG TANTTLKLLL AYTPPGIGKP SSRKQAMLGT |
| hrv-32 | IAGYYTHWTG SLRFSFMFCG SASTTLKLLL AYTPPGISKP TTRKEAMLGT |
| hrv-33 | IASYFTHWTG SVRFSFLFCG TANTTLKLLL AYTPPGIRKP ISRKEAMLGT |
| hrv-34 | IASYYTHWTG SLRFSFMFCG SANTTLKLLI AYTPPGISKP TKRKEAMLGT |
| dq473501-34 | IASYYTHWTG SLRFSFMFCG SANTTLKLLI AYTPPGISKP TKRKEAMLGT |
| dq473505-36 | LASYYTHWTG SLRFSFMFCG SASSTLKLLI AYTPPGVGKP KSRREAMLGT |
| hrv-38 | ISSYYTQWTG SLRFSFMFCG TANTTLKLLI AYTPPGIVKP RNRKEAMLGT |
| dq473495-38 | ISSYYTQWTG SLRFSFMFCG TANTTLKLLI AYTPPGIVKP RNRKEAMLGT |
| ay751783-39 | IASYYTHWTG SLRFSFMFCG TANTTLKLLL AYTPPGIDKP TTRKQAMLGT |
| hrv-40 | ICSYYTHWTG SLRFGFMFCG TANTTLKLLI AYTPPGIKKP ENRKQAMLGT |
| dq473491-41 | IASYYTHWTG SLRFSFMFCG SAFTTLKLLI AYTPPGIDVP STRKQAMLGT |
| hrv-43 | IASYYTHWTG SLRFSFMFCG SASTTLKLLL AYTPPGIAKP TTRKDAMLGT |
| dq473499-44 | IASYFTHWTG SLRFSFMFCG TANTTLKLLI AYTPPGIGKP ENRKQAMLGT |
| hrv-45 | IASYYTNWTG SIRLSFMFCG SANTSLKLLL AYTPPGVSKP TSRREAMLGT |
| dq473506-46 | IASYYTHWTG SIRISFMFCG SANTSLKLLI AYTPPGVPKP TSRKEAMLGT |
| hrv-47 | IASYFTHWTG SLRFSFMFCG TANTTLKLLL AYTPPGIGKP RDRKQAMLGT |
| dq473496-49 | ISSYYTHWTG SLRFSFMFCG TANTTVKLLL AYTPPGIAEP TTRKEAMLGT |
| hrv-49-f04 | ISSYYTHWTG SLRFSFMFCG TANTTVKLLL AYTPPGIREP TTRREAMLGT |
| hrv-50 | VSSYYTHWTG SLRFSFLFCG SANTTLKLLI AYTPPGIGKP TNRKEAMLGT |
| hrv-51 | IASYYTHWTG SLRFSFMFCG TASTSLKLLI AYTPPGVDKP NTRTKAMLGT |
| dq473507-53 | IASYYTHWTG SVRFSFMFCG TANTSLKLLI AYTPPGVPKP TSRKDAMLST |
| hrv-54 | ICSYYTHWTG SLRFSFMFCG TANTTLKVLI AYTPPGIKKP ETRKQAMLGT |
| hrv-54-f05 | ICSYYTHWTG SLRFSFMFCG TANTTLKVLI AYTPPGIKKP ETRKQAMLGT |
| dq473511-55 | IASYFTQWTG SLRFSFLFCG TANTTLKILV AYTPPGIRKP QTRREAMLGT |
| hrv-56 | ICSYYTHWTG SLRFSFMFCG TANTTLKVLL AYTPPGIKKP ESRKQAMLGT |
| hrv-57 | IASYYTHWTG SLRFSFLFCG TANTTLKLLL AYTPPGIEKP QSRKDAMLGT |
| hrv-58 | IASYYTHWTG SLRFSFMFCG SASATLKLLI AYTPPGVAKP KSRKEAMLGT |
| dq473500-59 | ICSYYTHWTG SLRFSFMFCG TANTTLKLLL AYTPPGIKKP ENRKQAMLGT |
| hrv-60 | ISSYYTQWTG SLRFSFMFCG TANTTLKLLI AYTPPGIAKP KSRKEAMLGT |
| hrv-61 | VSSYYTHWTG SVRFSFMFCG SALTTLKLLI AYTPPGIRVP RNRKEAMLGT |
| hrv-62 | IASYYTHWTG SLRFSFMFCG TANTTLKLLL AYTPPGIGEP RDRKQAMLGT |
| hrv-63 | ICSYYTHWTG SLRFSFMFCG TANTTLKLLL AYTPPGIKKP ESRKQAMLGT |
| hrv-64 | MSSYFTHWTG SLRFSFMFCG SAGTTLKLLI AYTPPGIEKP TKRKDAMLGT |
| ef173417-64 | MSSYFTHWTG SLRFSFMFCG SAGTTLKLLI AYTPPGIEKP TKRKDAMLGT |
| hrv-65 | IASYYTHWTG SLRFSFMFCG TANTSLKLLI AYTPPGVAKP TTRTMAMLGT |
| hrv-66 | IASYFTHWTG SLRFSFMFCG TANTTLKLLL AYTPPGIRKP ENRKQAMLGT |
| hrv-67 | IASYYTHWTG SLRFSFMFCG SASSTLKLLL AYTPPGISKP TSRKEAMLGT |
| hrv-68 | IASYYTHWTG SLRFSFMFCG TANTSLKLLI AYTPPGVPKP GSRQKAMLST |
| hrv-71 | ISSYYTHWTG SIRFSFMFCG TANTSLKLLI AYTPPGVGKP QNRTQAMLGT |
| dq473492-73 | IASYYTHWTG SLRFSFMFCG SAFSTLKLLL AYTPPGIAVP DSRKKAMLGT |
| dq473494-74 | ISSYFTHWTG SLRFSFMFCG TANSTLKLLL AYTPPGIDKP RSRKDAMLGT |
| dq473510-75 | IASYYTHWTG SLRFSFMFCG SASATLKLLL AYTPPGIAKP TTRKQAMLGT |
| dq473502-76 | IASYYTHWTG SIRFSFLFCG SANTTLKLLI AYTPPGIRKP KNRKEAMLGT |
| hrv-76 | IASYYTHWTG SIRFSFLFCG SANTTLKLLI AYTPPGIRKP KNRKEAMLGT |
| hrv-77 | IASYFTHWTG SLRFSFMFCG TANTTLKLLL AYTPPGIKKP ETRKQAMLGT |
| hrv-78 | IASYYTHWTG SLRFSFMFCG TANTTLKLLI AYTPPGVPKP DTRKKAMLGT |
| ef173418-78 | IASYYTHWTG SLRFSFMFCG TANTTLKLLI AYTPPGVPKP DTRKKAMLGT |
| hrv-80 | IASYYTHWTG SIRFSFMFCG SANTSLKLLI AYTPPGVPKP TSRREAMLGT |
| hrv-81 | IASYFTHWTG SLRFSFMFCG TANTTLKLLL AYTPPGISKP KNRKEAMLGT |
| hrv-81-f06 | IASYFTHWTG SLRFSFMFCG TANTTLKLLL AYTPPGISKP KNRKEAMLGT |
| hrv-81-f07 | IASYFTHWTG SLRFSFMFCG TANTTLKLLL AYTPPGISKP KNRKEAMLGT |
| hrv-82 | IASYYTHWTG SLRFSLMFCG TAGTTLKLLV AYTPPGIAKP TNRKDAMLGT |
| dq473509-82 | IASYYTHWTG SLRFSLMFCG TAGTTLKLLV AYTPPGIAKP ENRKDAMLGT |
| hrv-85 | ICSYYTHWTG SLRFSFMFCG TANTTLKLLL AYTPPGIDKP KNRKQAMLGT |
| pico-85 | ICSYYTHWTG SLRFSFMFCG TANTTLKLLL AYTPPGIDKP KNRKQAMLGT |
| dq473504-88 | MSSYFTHWTG SLRFSFMFCG SASTTLKLLL AYTPPGVGKP TSRREAMLGT |
| a10937-89 | LASYYTHWTG SLRFSFMFCG SASSTLKLLI AYTPPGVGKP KSRREAMLGT |
| hrv-89 | LASYYTHWTG SLRFSFMFCG SASSTLKLLI AYTPPGVGKP KSRREAMLGT |
| hrv-89-f08 | LASYYTHWTG SLRFSFMFCG SASSTLKLLI AYTPPGVGKP RSRREAMLGT |
| hrv-89-f09 | LASYYTHWTG SLRFSFMFCG SASSTLKLLI AYTPPGVGKP RSRREAMLGT |
| m16248-89 | LASYYTHWTG SLRFSFMFCG SASSTLKLLI AYTPPGVGKP KSRREAMLGT |
| hrv-90 | IASYYTHWTG SIRFSFLFCG TANTTLKLLL AYTPPGIRKP RDRREAMLGT |
| hrv-94 | ISSYYTHWTG SLRFSFMFCG SAGTTLKLLI AYTPPGIDKP TKRKDAMLGT |
| ef173419-94 | ISSYYTHWTG SLRFSFMFCG SAGTTLKLLI AYTPPGIDKP TKRKDAMLGT |
| hrv-95 | IASYYTHWTG SIRLSFMFCG SANSSLKLLI AYTPPGAPEP TKRKEAMLGT |
| hrv-96 | IASYYTHWTG SVRFSFMFCG SALTTLKLLI AYTPPGIRVP ENRKEAMLGT |
| hrv-98 | ICSYYTHWTG SLRFSFMFCG TANTTLKVLI AYTPPGIKKP ENRKQAMLGT |
| hrv-100 | IASYFTHWTG SLRFSFMFCG TANTTLKLLL AYTPPGIRKP TTRKQAMLGT |
| ef186077-qpm | VLNYYSNWSG SIKLTFFCVC DSFSTGKFLI AYTPPGADIP ESRRDAMLGT |
| ef077279-nat001 | VLNYFSNWSG SIKLTFFCVC DSFSTGKFLI AYTPPGAGIP ETRRDAMLGV |
| ny1078 | ILNYFSNWSG SIKLTFLCVC DSFSTGKFLI AYTPPGASIP ANRTDAMLGT |
| ef582385-c024 | VLNYFANWSG SISITFMCVC DSFSTGKFLL AYTPPGAALP PDRKTAMLGV |
| ef077280-nat045 | ILNYFSNWSG SIRVTCICVC DSFSTGKFLM AYTPPGGGLP TTRKEAMLGV |
| ef582387-c026 | VLNYYSNWSG SIKLTFFCVC DSFSTGKFLI AYTPPGADIP ETRRDAMLGT |
| ef582386-c025 | VLNYFSTWAG SITLSFLCVC DSFSTGKFLI AYTPPGGGLP KNRKEAMLGV |
| dq473485-03 | IAQYYTHWSG SLRISLMYTG PALSSAKIIL AYTPPGTRGP EDRKEAMLGT |
| ef173422-03 | IAQYYTHWSG SLRISLMYTG PALSSAKIIL AYTPPGTRGP EDRKEAMLGT |
| dq473490-04 | ICQYFTHWAG SLRLSFMYTG PALSSAKLLI AYTPPGTAGP ADRRTAMLGT |
| hrv-05 | LCQYFTHWAG SLRLSFMYTG PALSSAKLLI AYTPPGAQGP TKRKEAMLGT |
| dq473486-06 | IAQYYTHWSG SLRISLMYTG SALSSAKLIL AYTPPGAQGP TNRRDAMLGT |
| 105355-14 | IVQYYTHWSG SLRFSLMYTG PALSSAKLIL AYTPPGARGP QDRREAMLGT |
| k02121-14 | IVQYYTHWSG SLRFSSMYTG PALSSAKLTL AYTPPGARGP QDRREAMLGT |
| ef173420-17 | IAQYYTHWSG SIRISLMYTG PALSSAKLIL AYTPPGTKGP KDRKEAMLGT |
| hrv-26 | ICQYYTHWAG SLRLSFMYTG PALSSAKLLI AYTPPGAEGP TKRKDAMLGT |
| hrv-27 | IAQYYTHWAG SIRISFMYTG PALSSAKLLL AYTPPGAPGP TNRKDAMLGT |
| ef173421-27 | IAQYYTHWAG SIRISFMYTG PALSSAKLLL AYTPPGAPGP TNRKDAMLGT |
| dq473487-35 | IAQYYTHWSG SLKISLMYTG PALSSAKLIL AYTPPGAPGP ETRKDAMLGT |
| hrv-35 | IAQYYTHWSG SLKISLMYTG PALSSAKLIL AYTPPGAPGP ETRKDAMLGT |
| ef173423-37 | IAQYYTHWSG SLRISLMYTG PALSSAKLIL AYTPPGAQGP TNRKDAMLGT |
| hrv-42 | LCQYFTHWAG SLRLSFMYTG PALSSAKLLI AYTPPGAQGP IKRKEAMLGT |
| dq473488-48 | IAQYYTHWSG SIRISLMYTG PALSSAKLIL VYTPPGTEGP KNRKEAMLGT |
| hrv-52 | IAQYFTHWSG SIRISLMYTG PALSSAKLIL AYTPPGSGGP KDRKEAMLGT |
| hrv-52-f10 | IAQYFTHWSG SIRISLMYTG PALSSAKLIL AYTPPGAGGP KDRKEAMLGT |
| ef173424-52 | IAQYFTHWSG SIRISLMYTG PALSSAKLIL AYTPPGSGGP KDRKEAMLGT |
| hrv-69 | IAQYYSHWSG SIRISLMYTG PALSSAKLIL AYTPPGTKGP KTRREAMLGT |
| dq473489-70 | IAQYYTHWSG SIRISLMYTG PALSSAKLIL AYTPPGTEGP KSRKEAMLGT |
| hrv-72 | IVQYYTHWAG SLRFSLMYTG PALSSAKLIL SYTPPGANGP TTRKEAMLGT |
| hrv-79 | IVQYYTHWSG SLRFSLMYTG PALSSAKLIL AYTPPGAQGP TSRKEAMLGT |
| hrv-83 | IVQYYTHWSG SLRISLMYTG PALSSAKLIL AYTPPGAQGP TTKKDAXLGT |
| hrv-84 | IAQYYTHWAG SLRVSFMYTG PALSSAKLLI AYTPPGAPGP KTRKDAMLGT |
| hrv-86 | IAQYYTHWAG SLRFSLMYTG PALSSAKLIL AYTPPGVAGP KNRKEAMLGT |
| hrv-91 | IAQYYTHWSG SIRISLMYTG PALSSAKLIL AYTPPGTEGP KSRREAMLGT |
| hrv-92 | IVQYYAHWSG SLRISLMYTG PALSSAKLTL AYTPPGAQGP TSRKEAMLGT |
| ef173425-93 | IAQYYTHWAG SIRISFMYTG PALSSAKLLL AYTPPGALGP TNRKDAMLGT |
| hrv-97 | IAQYYTHWAG SIRISFMYTG PALSSAKLLV AYTPPGAPGP TTRKEAMLGT |
| hrv-99 | LSQYFTHWAG SLRLSFMYTG PALSSARLLI AYTPPGAQGP TKRKDAMLGT |
| | 501 550 |
| annotation | BFBBBB...B BBBBGBB... ....BBB... HHHH.BBBBH B...BBBB.. |
| af499637-cva13 | HVIWDIGLQS SCTMVVPWIS NTSYRRTVKD DFTEGGYISM FYQTRVVVPA |
| af546702-cva21 | HIIWDLGLQS SCSMVAPWIS NTVYRRCARD DFTEGGFITC FYQTRIVVPA |
| v01149-pv1m | HVIWDIGLQS SCTMVVPWIS NTTYRQTIDD SFTEGGYISV FYQTRIVVPL |
| d00239-01 | HVVWDVGLQS TISLVVPWVS ASHFRLTAND KYSMAGYITC WYQTNLVVPP |
| pico-01 | HVVWDVGLQS TISLVVPWVS ASHFRLTADN KYSMAGYITC WYQTNLVVPP |
| hrv-01 | HVVWDVGLQS TISLVVPWVS ASHFRLTADN KYSMAGYITC WYQTNLVVPP |
| x02316-02 | HVIWDVGLQS TISMVVPWIS ASHYRNTSPG R.STSGYITC WYQTRLVIPP |
| hrv-07 | HLVWDVGLQS TASLVVPWVS ASHFRFTTPD TYSAAGYITC WYQTNFVVPP |
| dq473503-07 | HLVWDVGLQS TASLVVPWVS ASHFRFTTPD TYSAAGYITC WYQTNFVVPP |
| hrv-08 | HIVWDVGLQS TCSLIIPWVS ASHFRNTTPD TYSKAGFVTC WYQTNFVTAP |
| pico-09 | HVVWDVGLQS TISMVVPWVS ASHFRNTTPD KYSLAGFITC WYQTNLVVPA |
| hrv-09 | HVVWDVGLQS TISMVVPWVS ASHFRNTTPD KYSLAGFITC WYQTNLVVPA |
| hrv-09-f01 | HVVWDVGLQS TISMVVPWVS ASHFRNTTPD KYSLAGFITC WYQTNLVVPA |
| hrv-09-f02 | HVVWDVGLQS TISMVVPWVS ASHFRNTTPD KYSLAGFITC WYQTNLVVPA |
| dq473498-10 | HIVWDIGLQS TVSLVVPWVS ASHFRYTTPD TYSAAGYITC WYQTNFVFPP |
| hrv-10 | HIVWDIGLQS TVSLVVPWVS ASHFRYTTPD TYSAAGYITC WYQTNFVFPP |
| ef173414-11 | HVVWDVGLQS TISMVVPWVS ASHYRNTTPD TYSLAGFVTC WYQTNLVVPP |
| ef173415-12 | HLVWDVGLQS TVSMIVPWVS ASHFRFTTPD TYSKAGYITC WYQTNFVVPP |
| hrv-13 | HVIWDVGLQS TVSMVVPWVS ASHYRNTTPD TYSAAGYITC WYQTDLITPP |
| hrv-13-f03 | HVIWDVGLQS TVSMVVPWVS ASHYRNTTPD TYSAAGYITC WYQTDLITPP |
| dq473493-15 | HVVWDVGLQS TISMIVPWVS ASHFRNTTPD TFSSAGYISC WYQTNLVVPP |
| 124917-16 | HVVWDVGLQS TVSLVVPWIS ASQYRFTTPD TYSSAGYITC WYQTNFVVPP |
| hrv-18 | HVVWDVGLQS TISMVVPWVS ASHFRNTTPD TYSLAGYITC WYQTNLIAPT |
| hrv-19 | HVVWDVGLQS TISMIVPWVS ASHYRNTTPD TFSLAGYITC WYQTNLVTPP |
| hrv-20 | HVVWDVGLQS TVSMVVPWVS ASHYRYTTPD TYSQAGYITC WYQTNFIVPP |
| hrv-21 | HVVWDVGLQS TISMVVPWIS ASHYRNTTPD KYSSAGYITC WYQTNLVVPP |
| hrv-22 | HVVWDVGLQS TISMIVPWIS AXHFRNTTPD TFSQAGYITC WYQTSLVTPP |
| dq473497-23 | HIIWDIGLQS TISMVVPWIS ASHYRNTSPD V.STSGFITC WYQTGLVIPP |
| hrv-24 | HVVWDVGLQS TISMVVPWVS ASHFRNTTPD KYSLAGYITC WYQTNLVVPP |
| ef173416-24 | HVVWDVGLQS TISMVVPWVS ASHFRNTTPD KYSLAGYITC WYQTNLVVPP |
| hrv-25 | HIVWDVGLQS TVSLVVPWVS SSHFRYTSRD EHSAAGYITC WYQTSLVFPP |
| dq473508-28 | HVVWDVGLQS TVSLVVPWIS ASHYRYTTPD TYSKAGYITC WYQTNFIVPP |
| hrv-29 | HIVWDVGLQS TVSLVVPWVS ASHFRYTSSD EHSAAGYITC WYQTQLVFPP |
| dq473512-30 | HVIWDIGLQS TISMVVPWIS ASHYRNTSPD V.SPSGYITC WYQTGLVIPP |
| hrv-30 | HVIWDIGLQS TISMVVPWIS ASHYRNTSPD V.SPSGYITC WYQTGLVIPP |
| hrv-31 | HIVWDVGLQS TVSLVVPWVS ASHFRYTSRD EHSAAGYITC WYQTNFVFPP |
| hrv-32 | HVVWDVGLQS TISMIVPWVS ASHFRNTTPD KYSLAGFITC WYQTNLVVPA |
| hrv-33 | HVVWDVGLQS TMSMVVPWVS ASHFRNTTPD TYSLAGYVTC WYQTSLVVPS |
| hrv-34 | HVVWDVGLQS TMSMVVPWVS ASHFRNTTPD KYSLAGYITC WYQTNLIAPQ |
| dq473501-34 | HVVWDVGLQS TMSMVVPWVS ASHFRNTTPD KYSLAGYITC WYQTNLIAPQ |
| dq473505-36 | HLVWDVGLQS TASLVVPWVS ASHFRFTTPD TYSSAGYITC WYQTNFVVPA |
| hrv-38 | HIVWDVGLQS TISMIVPWVS ASHFRNTTPD TYSLAGFITC WYQTNLVVPP |
| dq473495-38 | HIVWDVGLQS TISMIVPWVS ASHFRNTTPD TYSLAGFITC WYQTNLVVPP |
| ay751783-39 | HIVWDVGLQS TVSLVVPWVS ASHFRYTTPD TYSMAGYITC WYQTNFVFPP |
| hrv-40 | HIVWDVGLQS TISLVVPWVS ASHFRYTTPD TYTAAGYITC WYQTNFVFPP |
| dq473491-41 | HVIWDVGLQS TVSMVVPWVS ASHYRNTTPD TYSSAGYITC WYQTNLIIPP |
| hrv-43 | HVVWDVGLQS TISMIVPWIS ASHFRNTTPD AYSLAGYITC WYQTNLVVPP |
| dq473499-44 | HIVWDVGLQS TVSLVVPWVS ASHFRYTSSD ERSAAGYITC WYQTQLVFPP |
| hrv-45 | HLVWDVGLQS TCSLVIPWIS ASHFRNTTPD TYSKAGYVTC WYQTNFITAP |
| dq473506-46 | HLVWDVGLQS TASMVIPWVS ASHYRFTTPD IYTLAGYVTC WYQTNLVVAP |
| hrv-47 | HIVWDVGLQS TVSLVVPWVS ASHFRYTSRD EHSAAGYITC WYQTNFVFPP |
| dq473496-49 | HVIWDVGLQS TISMVVPWIS ASHYRNTSPG T.STSGYITC WYQTRLVIPP |
| hrv-49-f04 | HVIWDIGLQS TISMVVPWIS ASHYRNTSSG A.STAGYVTC WYQTRLVIPP |
| hrv-50 | HVVWDVGLQS TISMVVPWVS ASHYRNTTPD TYSLAGYITC WYQTNLIAPP |
| hrv-51 | HVVWDVGLQS TISMVVPWIS ASHYRFTTPD TYSQAGYITC WYQTNFVTPP |
| dq473507-53 | HVVWDVGLQS TMSMVVPWVS ASHYRYTTPD TYSKAGYITC WYQTNFIVPP |
| hrv-54 | HIVWDVGLQS TVSLVVPWVS ASHFRYTTPD TYSAAGYITC WYQTNFVFPP |
| hrv-54-f05 | HIVWDVGLQS TVSLVVPWVS ASHFRYTTPD TYSAAGYITC WYQTNFVFPP |
| dq473511-55 | HIVWDVGLQS TVSMVVPWVS ASHFRNTTPD TYSLAGYITC WYQTNLVVPP |
| hrv-56 | HIVWDVGLQS TVSLVVPWVS ASHFRYTTPD TYSAAGYITC WYQTNFVFPP |
| hrv-57 | HVVWDVGLQS TISMVVPWVS ASHYRNTTPD TYSQAGYITC WYQTNLIVPP |
| hrv-58 | HLVWDVGLQS TASLVVPWVS ASHFRFTTPD TYSSAGYITC WYQTNFVVPA |
| dq473500-59 | HIVWDVGLQS TISLVVPWVS ASHFRYTTPD NYSSAGFITC WYQTNFVFPP |
| hrv-60 | HIVWDVGLQS TISMIVPWVS ASHFRNTTPD TYSSAGFITC WYQTNLVFPP |
| hrv-61 | HLIWDVGLQS TVSMVVPWVS ASHYRNTTPD TYSIAGFITC WYQTKLVVPP |
| hrv-62 | HIVWDVGLQS TVSLVVPWVS SSHFRYTSRD EHSAAGYITC WYQTSLVFPP |
| hrv-63 | HIVWDVGLQS TISLVVPWVS ASHFRYTTPD NYSAAGYITC WYQTNFVFPP |
| hrv-64 | HVVWDVGLQS TISMIVPWVS ASHYRNTTPD TFSQAGYITX WYQTSLVTPP |
| ef173417-64 | HVVWDVGLQS TISMIVPWVS ASHYRNTTPD TFSQAGYITG WYQTSLVTPP |
| hrv-65 | HLVWDVGLQS TVSMVVPWVS ASHYRFTTPD TYSQAGYITC WYQTNFVVPP |
| hrv-66 | HIVWDVGLQS TVSLVVPWVS ASHFRYTTPD TYSAAGYITC WYQTNFVFPP |
| hrv-67 | HVVWDVGLQS TISMIVPWIS ASHFRNTTPD KYSLAGFITC WYQTNLVVPA |
| hrv-68 | HVVWDVGLQS TVSMVVPWVS ASHYRYTTPD TYSQAGYITC WYQTNFIVPP |
| hrv-71 | HMIWDVGLQS TVSMVVPWIS ASNYRFTTPD AYSQAGFITC WYQTNFVVPP |
| dq473492-73 | HVIWDVGLQS TVSIVVPWVS ASHYRNTTPD TYSLAGYITC WYQTKLVEPP |
| dq473494-74 | HVVWDVGLQS TISMIVPWVS ASHFRNTTPD TFSSAGFITC WYQTNLVVPP |
| dq473510-75 | HVVWDVGLQS TISMIVPWVS ASHFRNTTPD TYSLAGYVTC WYQTNLVVPP |
| dq473502-76 | HVVWDVGLQS TISMVVPWVS ASHFRNTTPD TYSLAGYVTC WYQTNLVVPP |
| hrv-76 | HVVWDVGLQS TISMVVPWVS ASHFRNTTPD TYSLAGYVTC WYQTNLVVPP |
| hrv-77 | HIVWDVGLQS TVSLVVPWVS ASHFRYTTPD TYSAAGYITC WYQTNFVFPP |
| hrv-78 | HLVWDVGLQS TVSLVVPWVS ASHFRFTTPD TYSKAGYITC WYQTNFVVPP |
| ef173418-78 | HLVWDVGLQS TVSLVVPWVS ASHFRFTTPD TYSKAGYITC WYQTNFVVPP |
| hrv-80 | HLVWDVGLQS TASMVVPWVS ASHYRFTTPD MYSLAGYITC WYQTNLIVAP |
| hrv-81 | HVVWDVGLQS TVSLVVPWVS ASQYRFTTPD TYSXAGYITC WYQTNFVVPP |
| hrv-81-f06 | HVVWDVGLQS TVSLVVPWVS ASQYRFTTPD TYSSAGYITC WYQTNFVVPP |
| hrv-81-f07 | HVVWDVGLQS TVSLVVPWVS ASQYRFTTPD TYSSAGYITC WYQTNFVVPP |
| hrv-82 | HVVWDVGLQS TISMIVPWVS ASHFRNTTPD KFSQAGYITC WYQTALVTPP |
| dq473509-82 | HVVWDVGLQS TISMIVPWVS ASHFRNTTPD KFSQAGYITC WYQTTLVTPP |
| hrv-85 | HIVWDVGLQS TISLVVPWVS ASHFRYTTPD TYSAAGYITC WYQTNFVFPP |
| pico-85 | HIVWDVGLQS TISLVVPWVS ASHFRYTTPD TYSRAGYITC WYQTNFVFPP |
| dq473504-88 | HLVWDVGLQS TASLVVPWVS ASHFRFTTPD TYSSAGYITC WYQTNFVVPP |
| a10937-89 | HLVWDVGLQS TASLVVPWVS ASHFRFTTPD TYSSAGYITC WYQTNFVVPD |
| hrv-89 | HLVWDVGLQS TASLVVPWVS ASHFRFTTPD TYSSAGYITC WYQTNFVVPD |
| hrv-89-f08 | HLVWDVGLQS TASLVVPWVS ASHFRFTTPD TYSSAGYITC WYQTNFVVPD |
| hrv-89-f09 | HLVWDVGLQS TASLVVPWVS ASHFRFTTPD TYSSAGYITC WYQTNFVVPD |
| m16248-89 | HLVWDVGLQS TASLVVPWVS ASHFRFTTPD TYSSAGYITC WYQTNFVVPD |
| hrv-90 | HVVWDVGLQS TISMVVPWVS ASHYRNTTPD KYSLAGFVTC WYQTNFIVPP |
| hrv-94 | HVVWDVGLQS TISMIVPWVS ASHYRNTTPD KFSQAGYITC WYQTSLVSPP |
| ef173419-94 | HVVWDVGLQS TISMIVPWVS ASHYRNTTPD KFSQAGYITC WYQTSLVSPP |
| hrv-95 | HIVWDVGLQS TCSLIIPWVS ASHFRNTTPD TYSKAGFVTC WYQTNFVTAP |
| hrv-96 | HLIWDVGLQS TVSMVVPWIS ASHFRNTTPD TYSLAGYITC WYQTKLVAPP |
| hrv-98 | HIVWDVGLQS TVSLVVPWVS ASHFRYTTPD TYSAAGYITC WYQTNLVFPP |
| hrv-100 | HIVWDVGLQS TVSLVVPWVS ASHFRYTTPD TYSAAGYITC WYQTNFVFPP |
| ef186077-qpm | HVVWDLGLQS SCHLVVPWIS SHFFRRTRKD NYTESGFVTL WHQTAFVSNG |
| ef077279-nat001 | HVVWDLGLQS SCHLVVPWIS SHFFRRTKKD DYTEGGFITL WYQTAFVSN. |
| ny1078 | HIIWDLGLQS SCHMVIPWIS SHFFRRTRKD NFTEGGFVTL WHQTAFVSNG |
| ef582385-c024 | HVIWDLGLQS SCTIVVPWMS GTFHRRTKAD NYTQAGYVSL WYQTDFVSPN |
| ef077280-nat045 | HVVWDLGLQS SCTLVAPWMS STFYRRTKGS NYTSGGYITL WYQTNFVATT |
| ef582387-c026 | HVVWDLGLQS SCHLVVPWIS SHFFRRTRKD NYTESGFVTL WHQTAFVSNG |
| ef582386-c025 | HVIWDLGLQS TCTIVVPWIA QGYYRHTKAD NYTESGYVTL WYQTNFV.PG |
| dq473485-03 | HVVWDIGLQS TIVMTIPWTS GVQFRYTDPD TYTSAGYLSC WYQTSLILPP |
| ef173422-03 | HVVWDIGLQS TIVMTIPWTS GVQFRYTDPD TYTSAGYLSC WYQTSLILPP |
| dq473490-04 | HVVWDIGLQS TVVLNIPWTS GVQFRYTDPD TYTSAGFVSC WYQTSLVLPP |
| hrv-05 | HVVWDIGLQS TVVLNIPWTS GVQYRYTDPD TYTSAGFVSC WYQTSLVLPP |
| dq473486-06 | HVVWDIGLQS TIVMTIPWTS GVQFRYTDPD TYTSAGYLSC WYQTSLILPP |
| 105355-14 | HVVWDIGLQS TIVMTIPWTS GVQFRYTDPD TYTSAGFLSC WYQTSLILPP |
| k02121-14 | HVVWDIGLQS TIVMTIPWTS GVQFRYTDPD TYTSAGFLSC WYQTSLILPP |
| ef173420-17 | HVVWDVGLQS TVVMNIPWTS GVQFRYTDPD TYTSAGYLSC WYQTSLILPP |
| hrv-26 | HVVWDIGLQS TVVLNIPWTS GVQYRYTDPD TYTSAGYVSC WYQTSLVLPP |
| hrv-27 | HIIWDIGLQS TIVMNIPWTA GSQFRYTDPD TYTHPGFISC WYQTSLVLPP |
| ef173421-27 | HIIWDIGLQS TIVMNIPWTA GSQFRYTDPD TYTHPGFISC WYQTSLVLPP |
| dq473487-35 | HVVWDIGLQS TIVMTIPWTS GVQFRYTDKD TYTSAGFLSC WYQTSLILPP |
| hrv-35 | HVVWDIGLQS TIVMTIPWTS GVQFRYTDKD TYTSAGFLSC WYQTSLILPP |
| ef173423-37 | HVVWDIGLQS TIVMTIPWTS GVQFRYTDPD TYTSAGYLSC WYQTSLILPP |
| hrv-42 | HVIWDIGLQS TVVLNIPWTS GVQFRYTDPD TYTSAGFISC WYQTSLVLPP |
| dq473488-48 | HVVWDVGLQS TVVMNIPWTS GVQFRYTDPD TYTSAGFLSC WYQTSLILPP |
| hrv-52 | HVVWDVGLQS TVVMNIPWTS GVQFRFTDPD TYTSAGFLSC WYQTSLILPP |
| hrv-52-f10 | HVVWDVGLQS TVVMNIPWTS GVQFRYTDPD TYTSAGFLSC WYQTSLILPP |
| ef173424-52 | HVVWDVGLQS TVVMNIPWTS GVQFRFTDPD TYTSAGFLSC WYQTSLILPP |
| hrv-69 | HVVWDVGLQS TVVMNIPWTS GVQFRYTDPD TYTSAGHLSC WYQTSLILPP |
| dq473489-70 | HVVWDVGLQS TVVMNIPWTS GVQFRYTDPD TYTSAGHLSC WYQTSLILPP |
| hrv-72 | HVVWDIGLQS TIVMTIPWTS GVQFRYTDPD TYTSAGFLSC WYQTSLILPP |
| hrv-79 | HVVWDIGLQS TIVMTIPWTS GVQFRYTDKD TYTSAGFLSC WYQTSLILPP |
| hrv-83 | HVVWDIGLQS TIVMTIPWTS GVQFRYTDKD TYTSAGFLSC WYQTSLILPP |
| hrv-84 | HLVWDIGLQS TVVMNIPWTS GSQFRYTDPD TYTHPGYISC WYQTSLILPP |
| hrv-86 | HVVWDIGLQS TIIMNIPWTS GVQFRYTDPD TYTSAGHLSC WYQTSLILPP |
| hrv-91 | HVVWDVGLQS TVVMNIPWTS GVQFRYTDPD TYTSAGHLSC WYQTSLILPP |
| hrv-92 | HVVWDIGLQS TIVMTIPWTS GVQFRYTDKD TYTSAGFLSC WYQTSLILPP |
| ef173425-93 | HVIWDIGLQS TVVMNIPWTA GAQFRYTDPD TYTHPGFISC WYQTSLVLPP |
| hrv-97 | HVVWDIGLQS TVVMNIPWTA GAQFRYTDPD TYTHPGYVSC WYQTSLVLPP |
| hrv-99 | HVVWDIGLQS TVVLNIPWTS GVQFRYTDPD TYTSAGFVSC WYQTSLVLPP |
| | 551 600 |
| annotation | .....BBBBB IBBBB...BB BBB....... ......QNP. .......... |
| af499637-cva13 | STPTSMDILC FISACNDFTV RLLRDTTHIT QS.ALPQGLE DLIQQVASNA |
| af546702-cva21 | STPTSMFMLG FVSACPDFSV RLLKDTPHIS QSKLIGRTQG IEDLIDTAIK |
| v01149-pv1m | STPREMDILG FVSACNDFSV RLLRDTTHIE QK.ALAQGLG QMLESMIDNT |
| d00239-01 | NTPQTADMLC FVSACKDFCL RMARDTDLHI QSGPIEQNPV ENYIDEVLNE |
| pico-01 | STPQTADMLC FVSACKDFCL RMARDTDLHI QSGPIEQNPV ENYIDEVLNE |
| hrv-01 | STPQTADMLC FVSACKDFCL RMARDTDLHI QSGPIEQNPV ENYIDEVLNE |
| x02316-02 | QTPPTARLLC FVSGCKDFCL RMARDTNLHL QSGAIAQNPV ENYIDEVLNE |
| hrv-07 | NTPRSAKMVC MVSACKDFCL RLARDTNLHM QEGVLEQNPV ENYVDSLLNE |
| dq473503-07 | NTPRSAKMVC MVSACKDFCL RLARDTNLHM QEGVLEQNPV ENYVDSLLNE |
| hrv-08 | DAPTTADIIC LVSACKDFCL RMARDTDQHT QVGAITQNPI EQFTEAVLNE |
| pico-09 | DTPTTANLLC FVSACKDFCL RMARDTNLHK QSGPITQNPV ENYIDQVLNE |
| hrv-09 | DTPTTANLLC FVSACKDFCL RMARDTNLHK QSGPITQNPV ENYIDQVLNE |
| hrv-09-f01 | DTPTTANLLC FVSACKDFCL RMARDTNLHK QSGPITQNPV ENYIDQVLNE |
| hrv-09-f02 | DTPTTANLLC FVSACKDFCL RMARDTNLHK QSGPITQNPV ENYIDQVLNE |
| dq473498-10 | NTPSTADMLC FVSACKDFCL RMARDTNMHI QSDAITQNPV ENYIDNVLNE |
| hrv-10 | NTPSTADMLC FVSACKDFCL RMARDTNMHI QSDAITQNPV ENYIDNVLNE |
| ef173414-11 | STPTTAKMLC FVSGCKDFCL RMARDTNLHL QSGPIEQNPV EDYVDGILNE |
| ef173415-12 | GTPNSANMLC FVSACKDFCL RMARDTDLHS QDTPITQNPV ERYVDEVLNE |
| hrv-13 | NTAPVADMIC FVSGCKDFCL RMARDTNLHK QSGVIAQNPV ERYVDEVLNE |
| hrv-13-f03 | NTAPVADMIC FVSGCKDFCL RMARDTNLHK QSGVIAQNPV ERYVDEVLNE |
| dq473493-15 | NTPTTAKMLC FVSGCKDFCL RMARDTDLHK QRGNITQNPV ENYIDEVLNE |
| 124917-16 | NTPNTAEMLC FVSGCNHFCL RMARDTDLHK QTGPITQNPV ERYVDEVLNE |
| hrv-18 | NAPQTARMLC FVSACKDFCL RMARDTNLHT QSGTIEQNPV ENYIDEVLNE |
| hrv-19 | NTPSTARMLC FVSGCKDFCL RMARDTNLHK QTGTITQNPV EKYVDTILNE |
| hrv-20 | NTPREADIIC FVSGCKDFCL RMARDTNLHT QVGVMEQNPV ERYTEAILNE |
| hrv-21 | NTPTSAKMLC FVSGCKDFCL RMARDTSLHK QSAPITQNPV ENYIDEVLNE |
| hrv-22 | STPETARMLC FVSGCKDFCL RMARDTNLHK QIGAITQNPV EKYIDGVLNE |
| dq473497-23 | DTPSTARLLC FVSGCKDFCL RMARDTNLHM QKGIIAQNPI ENYVDEVLNE |
| hrv-24 | NTPTTAKMLC FVSGCKDFCL RMARDTNLHL QSAPITQNPV ENYIDEVLNE |
| ef173416-24 | NTPTTAKMLC FVSGCKDFCL RMARDTNLHL QSAPITQNPV ENYIDEVLNE |
| hrv-25 | NTPSTADMLC FVSACKDFCL RMARDTDMHV QSEAIEQNPI ENYVDQVLNE |
| dq473508-28 | STPNSANIIC FVSACKDFCL RMARDTNLHT QVGAITQNPV EKYTEALLNE |
| hrv-29 | NTPNTADMLC FVSACKDFCL RMARDTDMHI HNEIITQNPV ENYVDEVLNE |
| dq473512-30 | ETPPTARLLC FVSGCKDFCL RMARDTSLHM QKGVIEQNPV ENFVDEVLSE |
| hrv-30 | ETPPTARLLC FVSGCKDFCL RMARDTSLHM QKGVIEQNPV ENFVDEVLSE |
| hrv-31 | NTPNTANMLC FVSACKDFCL RMARDTDMHI QDDAITQNPV ENYVEEVLNE |
| hrv-32 | DTPATANLLC FVSACKDFCL RMARDTNLHK QSGPITQNPV ENYIDQVLNE |
| hrv-33 | STPITAKMLC FVSGCKDFCL RMARDTNLHL QSGIITQNPV ENYIEEVLNE |
| hrv-34 | NTPQTAKILC FVSACKDFCL RMARDTNLHK QSGPIEQNPV ENYIDEVLNE |
| dq473501-34 | NTPQTAKILC FVSACKDFCL RMARDTNLHK QSGPIEQNPV ENYIDEVLNE |
| dq473505-36 | STPDNAKMVC MVSACKDFCL RLARDTNLHM QEGVLTQNPV ENYIDNVLNE |
| hrv-38 | DTPATARMLC FVSGCKDFCL RMARDTNLHK QSGAITQNPV EEYIDGVLNE |
| dq473495-38 | DTPATARMLC FVSGCKDFCL RMARDTNLHK QSGAITQNPV EEYIDGVLNE |
| ay751783-39 | NTPNNANMIC FVSGCKDFCL RMARDTDMHV QNVPITQNPV ENYIDEVLNE |
| hrv-40 | NTPATADMLC FVSACKDFCL RMARDTDMHV QNVPITQNPV ERYVDEVLNE |
| dq473491-41 | NAAPVADMIC FVSGCKDFCL RMARDTNLHK QSGVIEQNPV ERYVDEVLNE |
| hrv-43 | NTPSTAKMLC FVSGCKDFCL RMARDTNLHK QSGAIVQNPV ENYVDEILNQ |
| dq473499-44 | NTPNTADMLC FVSACKDFCL RMARDTDMHT HNEIITQNPV ENYVDEVLNE |
| hrv-45 | NTPPTADIIC LVSACKDFCL RMARDTNQHT QLGAIEQNPV EQFAEAVLDQ |
| dq473506-46 | NTPTTARMIC FVSGCKDFCL RMARDTNLHS QTGAITQNPV EKYTEAVLNE |
| hrv-47 | NTPNRADMLC FVSACKDFCL RMARDTDMHI QNDAITQNPV ENYVEEVLNE |
| dq473496-49 | QTPATARLLC FVSGCKDFCL RMARDTNLHL QSGVIEQNPV EHYIDEVLNE |
| hrv-49-f04 | QTPPTARLLC FVSGCKDFCL RMARDTNLHL QSGPIEQNPV EQYIDEVLNE |
| hrv-50 | NTPSTARMLC FVSGCKDFCL RMARDTNLHT QSGNIEQNPV ENYIDEVLNE |
| hrv-51 | STPKYADIIC FVSGCKDFCL RMARDTNLHS QTVNITQNPV EKYTEALLNE |
| dq473507-53 | STPNSADIIC FVSGCKDFCL RMARDTNLHT QVGAITQNPV EKYTEAILNE |
| hrv-54 | NTPNSADMLC FVSACKDFCL RMARDTDMHV QNVPIEQNPV ERYVDEVLNE |
| hrv-54-f05 | NTPNNADMLC FVSACKDFCL RMARDTDMHV QNVPIEQNPV EKYVDEVLNE |
| dq473511-55 | NTPTTARMLC FVSGCKDFCL RMARDTNLHL QSAPITQNPV ERYVDEVLNE |
| hrv-56 | NTPNTADMLC FVSACKDFCL RMARDTDMHV QNVPITQNPV ERYVDDVLNE |
| hrv-57 | NTPTTARMLC FVSGCKDFCL RMARDTNLHM QSMPITQNPV ENFVDEVLNE |
| hrv-58 | NTPANAKMAC MVSACKDFCL RLARDTNLHM QDGVLTQNPV ENYIDNVLNE |
| dq473500-59 | NTPSSADMLC FVSACKDFCL RMARDTDTHT QIVPITQNPV ENYVNDVLNE |
| hrv-60 | DTPTTARMLC FVSGCKDFCL RMARDTNLHK QSGIITQNPV ESYIDGVLNE |
| hrv-61 | NTASTADMLC FVSGCKDFCL RMARDTNLHK QSGPIEQNPV ERYVDEVLNE |
| hrv-62 | NTPGTADMLC FVSACKDFCL RMARDTDMHT QSDAIEQNPI ENYVDQVLNE |
| hrv-63 | NTPNSADMLC FVSACKDFCL RMARDTDMHV QNVPITQNPV ENYVNDVLNE |
| hrv-64 | STPQTARMLC FVSGCKDFCL RMARDTNLHK QIGAITQNPV EQYIDGVLNE |
| ef173417-64 | STPQTARMLC FVSGCKDFCL RMARDTNLHK QIGAITQNPV EQYIDGVLNE |
| hrv-65 | NTPTTANIIC FVSGCKDFCL RMARDTNLHS QTVNITQNPI EKYTEALLNE |
| hrv-66 | NTPSTADMLC FVSACKDFCL RMARDTDMHV QNDAITQNPV EDYVEGVLNE |
| hrv-67 | NTPTTANLLC FVSACKDFCL RMARDTNLHK QTGPITQNPV EDYVDQVLNE |
| hrv-68 | NTPNTADIIC FVSGCKDFCL RMARDTNLHT QAGVIEQNPV EKYTEAVLNE |
| hrv-71 | NTPKTANIIC FVSGCKDFCL RMARDTNLHS QTVNIEQNPV EKYTEAILNE |
| dq473492-73 | NTTPVADMIC FVSGCKDFCL RMARDTNLHK QSGVIAQNPV ERYVDEVLNE |
| dq473494-74 | NTPVTARMLC FVSGCKDFCL RMARDTDLHK QRGNITQNPV ENYIDEVLNE |
| dq473510-75 | NTPPNAKMLC FVSGCKDFCL RMARDTNLHK QSGVIEQNPV ENYVDEILNQ |
| dq473502-76 | NTPTTAKMLC FVSGCKDFCL RMARDTNLHL QSGPITQNPV ENYVDEILNE |
| hrv-76 | NTPTTAKMLC FVSGCKDFCL RMARDTNLHL QSGPITQNPV ENYVDEILNE |
| hrv-77 | NTPNTADMLC FVSACKDFCL RMARDTDMHI QNDAITQNPV EDYIDNVLNE |
| hrv-78 | GTPNTANMLC FVSGCKDFCL RMARDTDLHV QTTPITQNPV EEYVDQVLNE |
| ef173418-78 | GTPNTANMLC FVSGCKDFCL RMARDTDLHV QTTPITQNPV EEYVDQVLNE |
| hrv-80 | NTPSTARMIC FVSGCKDFCL RMARDTNLHV QTGPITQNPV EKYTEAILNE |
| hrv-81 | NTPNTAEMLC FVSGCKDFCL RMARDTDLHK QSGPITQNPV ERYVDEVLNE |
| hrv-81-f06 | NTPNTAEMLC FVSGCKDFCL RMARDTDLHK QSGPIEQNPV ERYVDEVLNE |
| hrv-81-f07 | NTPNTAEMLC FVSGCKDFCL RMARDTDLHK QSGPIEQNPV ERYVDEVLNE |
| hrv-82 | STPATARMLC FVSGCKDFCL RMARDTNLHK QIGPITQNPV EKYVDSVLNE |
| dq473509-82 | STPATARMLC FVSGCKDFCL RMARDTNLHK QVGPITQNPV EKYVDSVLNE |
| hrv-85 | NTPATADMLC FVSACKDFCL RMARDTDMHV QDVPITQNPV EKYVDEVLNE |
| pico-85 | NTPATADMLC FVSACKDFCL RMARDTDMHV QDVPITQNPV EKYVDEVLNE |
| dq473504-88 | GTPKNAKMVC MVSACKDFCL RLARDTNLHM QEGVLTQNPV ENYVDNLLNE |
| a10937-89 | STPDNAKMVC MVSACKDFCL RLARDTNLHT QEGVLTQNPV ENYIDSVLNE |
| hrv-89 | STPDNAKMVC MVSACKDFCL RLARDTNLHT QEGVLTQNPV ENYIDSVLNE |
| hrv-89-f08 | STPDNAKMVC MVSACKDFCL RLARDTNLHT QEGVLTQNPV ENYIDSVLNE |
| hrv-89-f09 | STPDNAKMVC MVSACKDFCL RLARDTNLHT QEGVLTQNPV ENYIDSVLNE |
| m16248-89 | STPDNAKMVC MVSACKDFCL RLARDTNLHT QEGVLTQNPV ENYIDSVLNE |
| hrv-90 | NTPTTAKMLC FVSGCKDFCL RMARDTNLHL QSGPITQNPV ENYIDEVLNE |
| hrv-94 | STPQQARMLC FVSGCKDFCL RMARDTNLHK QIGAITQNPV EKYIDGVLNE |
| ef173419-94 | STPQQARMLC FVSGCKDFCL RMARDTNLHK QIGAITQNPV EKYIDGVLNE |
| hrv-95 | DAPTTADIIC LVSACKDFCL RMARDTDQHT QVGAITQNPI EQFTEAVLNE |
| hrv-96 | NTPTTADMLC FVSGCKDFCL RMARDTNLHK QSGPIAQNPV ERYVDEVLNE |
| hrv-98 | NTPNSADMLC FVSACKDFCL RMARDTDMHV QEVPIEQNPV ERYVDEVLNE |
| hrv-100 | NAPNTADMLC FVSACKDFCL RMARDTDMHI QNDAIQQNPV ENYVEGVLNE |
| ef186077-qpm | ...TSGSIMV TCSACSDMSV RMLRDTPMMK QEDNITQNPV EEFVEHTLKE |
| ef077279-nat001 | ..GATGAIMV TCSACSDMSV RMLRDTPMMQ QDENIAQNPV EEFVDHTLQK |
| ny1078 | ...QVGSIMV TCSACSDMSV RMLRDTPMMK QEINIAQNPV EKFIDQTLEE |
| ef582385-c024 | ..DGIGTIVA TCSGCPDLSV RMLRDTPMMK QEKDLTQNPV EDYIDKVVDT |
| ef077280-nat045 | T.GGTGTIIA TCSACPDLSV RMMRDTPMIK QPENNIQNPV DNFVDEVLKE |
| ef582387-c026 | ...TTGSIMV TCSACSDMSV RMLRDTPMMR QDEDITQNPV EEFVEHTLKE |
| ef582386-c025 | SAIAQGSILV TCSACPDMAV RMLRDTPMIT QDKNTLQNPV EQFVDNVLEE |
| dq473485-03 | QTSGQVYLLS FISACPDFKL RLMKDTQTIS QTDALTEGLS DELEEVIVEK |
| ef173422-03 | QTSGQVYLLS FISACPDFKL RLMKDTQTIS QTDALTEGLS DELEEVIVEK |
| dq473490-04 | QVEQTVYMLG FVSACPDFKL RLMKDTQSIQ QETALTEGLG EDLMEVIVDK |
| hrv-05 | QTQQTVYMLG FISACPDFKL RLMKDTQSIH QETALTEGLE DDLVEVIVDK |
| dq473486-06 | NTTGQVHLLS FISACPDFKL RLMKDTQTIS QTDALTEGLG DELEEVIVEK |
| 105355-14 | ETTGQVYLLS FISACPDFKL RLMKDTQTIS QTVALTEGLG DELEEVIVEK |
| k02121-14 | ETTGQVYLLS FISACPDFKL RLMKDTQTIS QTVALTEGLG DELEEVIVEK |
| ef173420-17 | DTTGTVYLLA FISACPDFKL RLMKDTQTIS QTEALMEGFE DELEEVVIDK |
| hrv-26 | QSQQTVCLLG FISACPDFKL RLMKDTQSIY QDSALTEGLE DDLVEVIVDK |
| hrv-27 | DTNQKVFIIG FVSACPDFKL RLLKDTSSIS QTEALTEGLG EELEEVIVDK |
| ef173421-27 | DTNQKVFIIG FVSACPDFKL RLLKDTSSIS QTEALTEGLG EELEEVIVDK |
| dq473487-35 | QTQGQVYLLS FISACSDFKL RLMKDTQTIS QTDALPEGLG EELEEVIVEK |
| hrv-35 | QTQGQVYLLS FISACSDFKL RLMKDTQTIS QTDALPEGLG EELEEVIVEK |
| ef173423-37 | NTAGQVYLLS FISACSDFKL RLMKDTQTIS QTDALTEGLG DELEEVIVEK |
| hrv-42 | QTQQTVYILG FISACPDFKL RLMKDTQSIH QETALTEGLE DELMEVIVDK |
| dq473488-48 | DTSGAVYLLA FVSACPDFKL RLMKDTQTIS QTEALTEGFE EELEEVVVDK |
| hrv-52 | ETSGTVYLLA FVSACPDFKL RLMKDTQTIS QTEALTEGFG EELEEVVVDK |
| hrv-52-f10 | ETSGTVYLLA FVSACPDFKL RLMKDTQTIS QTEALTEGLG EELEEVVVDK |
| ef173424-52 | ETSGTVYLLA FVSACPDFKL RLMKDTQTIS QTEALTEGFG EELEEVVVDK |
| hrv-69 | DTAGTVYLLA FISACPDFKL RLMKDTQTIS QTEALTEGLG EELEEVVIDK |
| dq473489-70 | DTTGTVYLLA FISACPDFKL RLMKDTQTIS QTEALMEGFE GELEEVVIDK |
| hrv-72 | DTPTEVYMLS FISACPDFKL RLMKDTQTIS QTVALTEGLN DELEEVIVEK |
| hrv-79 | QTAGKVYLLS FISACPDFKL RLMKDTQTIS QTTALTEGLN DELEEVIVEK |
| hrv-83 | ETSGTVYLLS FVSACPDFKL RLMKDTQTIS QTSALTEGLN DELEEVIVEK |
| hrv-84 | ETNQTVYLLG FISACPDFKL RLMKDTSSIS QERALTEGLE DVLEEVIVDK |
| hrv-86 | QTSGTAYLLS FISACPDFKL RLMKDTQTIS QTDALEEGLG DELEEVIVEK |
| hrv-91 | DTTGAVHLLA FISACPDFKL RLXKDTQTIS QTEALTEGFE GELEEVVIDK |
| hrv-92 | QTAGTVYLLS FISACPDFKL RLMKDTQTIS QTTALTEGLN DELEEVIVEK |
| ef173425-93 | GTNQNVYILG FVSACPDFKL RLLKDTSSIS QTEALTEGLG QELEEVIVDK |
| hrv-97 | ETNQSVYILG FISACPDFKL RLMKDTSSIS QSEALTEGLG EELEEVIVDK |
| hrv-99 | QTQQTVYILG FVSACPDFKL RLMKDTQSIY QDTALTEGLE EDLVEVIVDK |
| | 601 650 |
| annotation | .......... .......... .......... ......HHHH H.....HHHH |
| af499637-cva13 | LQLSQPTRPA LPPAEQSVPN TNQTTPEHSK EVPALTAVET GATNPLEPGD |
| af546702-cva21 | NALRVSQ... .PPSTQS... TEATSGVNSQ EVPALTAVET GASGQAIPSD |
| v01149-pv1m | VRETVGA... .ATSRDALPN TEASGPTHSK EIPALTAVET GATNPLVPSD |
| d00239-01 | VLV....... .......VPN IKESHHTTSN SAPLLDAAET GHTSNVQPED |
| pico-01 | VLV....... .......VPN IKESHHTTSN SAPLLDAAET GHTSNVQPED |
| hrv-01 | VLV....... .......VPN IKESHHTTSN SAPLLDAAET GHTSNVQPED |
| x02316-02 | VLV....... .......VPN INSSNPTTSN SAPALDAAET GHTSSVQPED |
| hrv-07 | VLV....... .......VPN IQPSTSVSSH SVPALDAAET GHTSSVQPED |
| dq473503-07 | VLV....... .......VPN IQPSTSVSSH SVPALDAAET GHTSSVQPED |
| hrv-08 | VLV....... .......VPN TQASNGSIAN SAPALDAAET GHTSSVQPED |
| pico-09 | VLV....... .......VPN IKESNPTTSN SAPALDAAET GHTSNVQPED |
| hrv-09 | VLV....... .......VPN IKESNPTTSN SAPALDAAET GHTSNVQPED |
| hrv-09-f01 | VLV....... .......VPN IKESNPTTSN SAPALDAAET GHTSNVQPED |
| hrv-09-f02 | VLV....... .......VPN IKESNPTTSN SAPALDAAET GHTSNVQPED |
| dq473498-10 | VLV....... .......VPN IRESHPSTSN SAPILDAAET GHTSSVQPED |
| hrv-10 | VLV....... .......VPN IRESHPSTSN SAPILDAAET GHTSSVQPED |
| ef173414-11 | VLV....... .......VPN IKESQATTSN SAPALDAAET GHTSKVQPED |
| ef173415-12 | VLV....... .......VPN INKSNGQLSN AAPALDAAET GHTSQTQPED |
| hrv-13 | VLV....... .......VPN ISESSSTTSN SAPALDAAET GHTSSVQPED |
| hrv-13-f03 | VLV....... .......VPN ISESKPTTSN SAPALDAAET GHTSSVQPED |
| dq473493-15 | VLV....... .......VPN IKESHSSTSN SAPALDAAET GHTSSVQPED |
| 124917-16 | VLV....... .......VPN INQSHPTTSN AAPVLDAAET GHTNKIQPED |
| hrv-18 | VLV....... .......VPN VNESHAITSN SAPALDAAET GHTSNVQPED |
| hrv-19 | VLV....... .......VPN INESHPSTSN AAPALDAAET GHTSNVQPED |
| hrv-20 | VLV....... .......VPN ITSSNSQTSN AAPALDAAET GHTNQVQPED |
| hrv-21 | VLV....... .......VPN IRESHGTTSN SAPALDAAET GHTSNVQPED |
| hrv-22 | VLV....... .......VPN TNESXPSTSN AAPALDAAET GHTSNVQPED |
| dq473497-23 | VLV....... .......VPN INSSHPTTSN SAPALDAAET GHTSNVQPED |
| hrv-24 | VLV....... .......VPN IKESKPSTSN SAPALDAAET GHTSSVQPED |
| ef173416-24 | VLV....... .......VPN IKESKPSTSN SAPALDAAET GHTSSVQPED |
| hrv-25 | VLV....... .......VPN IKESHPSTSN SAPILDAAET GHTSNVQPED |
| dq473508-28 | VLV....... .......VPN INPSNAQTTN AAPALDAAET GHTSQTQPED |
| hrv-29 | VLV....... .......VPN IRESHPSTSN SAPILDAAET GHTSNVQPED |
| dq473512-30 | VLV....... .......VPN INSSHPTTSN SAPALDAAET GHTSNVQPED |
| hrv-30 | VLV....... .......VPN INSSHPTTSN SAPALDAAET GHTSNVQPED |
| hrv-31 | VLV....... .......VPN IKESHPSTSN SAPILDAAET GHTSNVQPED |
| hrv-32 | VLV....... .......VPN IKESNPTTSN SAPALDAAET GHTSNVQPED |
| hrv-33 | VLV....... .......VPN IRESQATTSN SAPALDAAET GHTNNVQPED |
| hrv-34 | VLV....... .......VPN IKESQATTSN SAPALDAAET GHTSSVQPED |
| dq473501-34 | VLV....... .......VPN IKESQATTSN SAPALDAAET GHTSSVQPED |
| dq473505-36 | VLV....... .......VPN IQPSSSVSSH SAPALDAAET GHTSSVQPED |
| hrv-38 | VLV....... .......VPN IKESHSSTSN SAPALDAAET GHTSNVQPED |
| dq473495-38 | VLV....... .......VPN IKESHSSTSN SAPALDAAET GHTSNVQPED |
| ay751783-39 | VLV....... .......VPN IRESHPTTSN AATALDAAET GHTSSIQPED |
| hrv-40 | VLV....... .......VPN IRESHPTTSN SAPALDAAET GHTSNIQPED |
| dq473491-41 | VLV....... .......VPN ISESSPTTSN SAPALDAAET GHTSNVQPED |
| hrv-43 | VLV....... .......VPN TVESHSTTSN AAPALDAAET GHTSQVQPED |
| dq473499-44 | VLV....... .......VPN IRESHPSTSN SAPILDAAET GHTSNVQPED |
| hrv-45 | VLV....... .......VPN TRPSDGLIAN SAPALDAAET GHTSSVQPED |
| dq473506-46 | VLV....... .......VPN INASSGHTSN SAPALDAAET GHTSQIQPED |
| hrv-47 | VLV....... .......VPN IKESHPSTSN SAPILDAAET GHTSNVQPED |
| dq473496-49 | VLV....... .......VPN INSSHPTTSN SAPALDAAET GHTSNVQPED |
| hrv-49-f04 | VLV....... .......VPN INSSHPTTSN SAPALDAAET GHTSNVQPED |
| hrv-50 | VLV....... .......VPN IKESQATTSN SAPALDAAET GHTSNVQPED |
| hrv-51 | VLV....... .......VPN IQPSSGHTSN AAPALDAAET GHTSQVQPED |
| dq473507-53 | VLV....... .......VPN INASNPQTSN SAPALDAAET GHTSQTQPED |
| hrv-54 | VLV....... .......VPN IRESHPATSN SAPALDAAET GHTSGIQPED |
| hrv-54-f05 | VLV....... .......VPN IRESHPATSN SAPALDAAET GHTSGIQPED |
| dq473511-55 | VLV....... .......VPN IRESQAATSN SAPVLDAAET GHTSNVQPED |
| hrv-56 | VLV....... .......VPN IRESHPSTSN SAPALDAAET GHTSAIQPED |
| hrv-57 | VLV....... .......VPN IKQSQATTSN SAPALDAAET GHTSNVQPED |
| hrv-58 | VLV....... .......VPN IQPSTSVSSH SVPALDAAET GHTSSVQPED |
| dq473500-59 | VLV....... .......VPN IQESHPTTSN AAPALDAAET GHTSSIQPED |
| hrv-60 | VLV....... .......VPN IRESQPTTSN SAPALDAAET GHTSNVQPED |
| hrv-61 | VLV....... .......VPN INQSNPTTSN SAPVLDAAET GHTSNVQPED |
| hrv-62 | VLV....... .......VPN IKESHPSTSN SAPILDAAET GHTSNVQPED |
| hrv-63 | VLV....... .......VPN IQESHPTTSN AAPVLDAAET GHTSSIQPED |
| hrv-64 | VLI....... .......VPN INESHPSTSN AAPALDAAET GHTSNVQPED |
| ef173417-64 | VLI....... .......VPN INESHPSTSN AAPALDAAET GHTSNVQPED |
| hrv-65 | VLV....... .......VPN IQASNGHTSN AAPALDAAET GHTSQVQPED |
| hrv-66 | VLV....... .......VPN IKESHPSTSN AAPILDAAET GHTSKVQPED |
| hrv-67 | VLV....... .......VPN IKQSEPTTSN SAPALDAAET GHTSSVQPED |
| hrv-68 | VLV....... .......VPN IPASNTQTSN AAPALDAAET GHTNQVQPED |
| hrv-71 | VLV....... .......VPN IQPSNGHTSN SAPALDAAET GHTNQVQPED |
| dq473492-73 | VLV....... .......VPN INESNPTTSN SAPALDAAET GHTSGVQPED |
| dq473494-74 | VLV....... .......VPN IRESHSSTSN SAPALDAAET GHTSNVQPED |
| dq473510-75 | VLV....... .......VPN TMESHPTTSN AAPALDAAET GHTSHVQPED |
| dq473502-76 | VLV....... .......VPN IKESQATTSN AAPALDAAET GHTSSVQPED |
| hrv-76 | VLV....... .......VPN IKESQATTSN AAPALDAAET GHTSSVQPED |
| hrv-77 | VLV....... .......VPN TKESHPSTSN SAPILDAAET GHTSSVQPED |
| hrv-78 | VLV....... .......VPN IKESKPQSSN SAPVLDAAET GHTNQVQPED |
| ef173418-78 | VLV....... .......VPN IKESKPQSSN SAPVLDAAET GHTNQVQPED |
| hrv-80 | VLV....... .......VPN ISASNGHTSN SAPTLDAAET GHTSQVQPED |
| hrv-81 | VLV....... .......VPN INESHPTTSN SAPVLDAAET GHTSNIQPED |
| hrv-81-f06 | VLV....... .......VPN INESHPTTSN AAPVLDAAET GHTSNIQPED |
| hrv-81-f07 | VLV....... .......VPN INESHPTTSN AAPVLDAAET GHTSNIQPED |
| hrv-82 | VLV....... .......VPN INESHPSTSN SAPALDAAET GHTSTVQPED |
| dq473509-82 | VLV....... .......VPN INESHPSTSN SAPALDAAET GHTSTVQPED |
| hrv-85 | VLV....... .......VPN IKESHPTTSN SAPALDAAET GHTSSIQPED |
| pico-85 | VLV....... .......VPN IKESHPTTSN SAPALDAAET GHTSSIQPED |
| dq473504-88 | VLV....... .......VPN IQPSTSVSSH SVPALDAAET GHTSSVQPED |
| a10937-89 | VLV....... .......VPN IQPSTSVSSH AAPALDAAET GHTSSVQPED |
| hrv-89 | VLV....... .......VPN IQPSTSVSSH AAPALDAAET GHTSSVQPED |
| hrv-89-f08 | VLV....... .......VPN IQPSTSVSSH AAPALDAAET GHTSSVQPED |
| hrv-89-f09 | VLV....... .......VPN IQPSTSVSSH AAPALDAAET GHTSSVQPED |
| m16248-89 | VLV....... .......VPN IQPSTSVSSH AAPALDAAET GHTSSVQPED |
| hrv-90 | VLV....... .......VPN IKESKPSTSN SAPALDAAET GHTSDVQPED |
| hrv-94 | VLV....... .......VPN INESHPSTSN AAPALDAAET GHTSNVQPED |
| ef173419-94 | VLV....... .......VPN INESHPSTSN AAPALDAAET GHTSNVQPED |
| hrv-95 | VLV....... .......VPN TQASNGSIAN SAPALDAAET GHTSSVQPED |
| hrv-96 | VLV....... .......VPN INESYPTTSN SAPVLDAAET GHTSNVQPED |
| hrv-98 | VLV....... .......VPN IKESHPATSN SAPTLDAAET GHTSGIQPED |
| hrv-100 | VLV....... .......VPN IRESHPSTSN SAPILDAAET GHTSNVQPED |
| ef186077-qpm | VLV....... .......VPD TQASGPVHTT KPQALGAVEI GATADVGPET |
| ef077279-nat001 | VMA....... .......VPD TQASGPTHTN KPQTLGALEI GATAEIGPET |
| ny1078 | VLV....... .......VPD TQASGPVHTT KPQALGALEI GATADVGPEA |
| ef582385-c024 | VLQ....... .......VPN TQPSGPQHSI QPSALGAMEI GASSTTIPGD |
| ef077280-nat045 | VLV....... .......VPD TKPSGPTHTV KPTVLNAMEI GVTPDATPES |
| ef582387-c026 | VLV....... .......VPD TQASGPVHTT KPQALGAVEI GATADVGPET |
| ef582386-c025 | VLV....... .......VPN TQPSGPIHTT KPTALSAMEI GASSDVKPED |
| dq473485-03 | TKQ....... .......TLA SVSSGPKHTQ SVPALTANET GATLPTRPSD |
| ef173422-03 | TKQ....... .......TLA SVSSGPKHTQ SVPALTANET GATLPTRPSD |
| dq473490-04 | THQ....... .......TLA SVKSDSKHTQ KVPALTANET GATLPTTPSD |
| hrv-05 | AQQ....... .......TLA SIKSDSKHTQ KVPSLTANET GATLPTTPSD |
| dq473486-06 | TKQ....... .......TLA SVSSGPKHTQ SVPILTANET GATMPTNPSD |
| 105355-14 | TKQ....... .......TVA SISSGPKHTQ KVPILTANET GATMPVLPSD |
| k02121-14 | TKQ....... .......TVA SISSGPKHTQ KVPILTANET GATMPVLPSD |
| ef173420-17 | MKQ....... .......VTA SSQSGPKHTQ KVPALSANET GATLPTNPSD |
| hrv-26 | TQQ....... .......ALA SIKSGSKHTQ KAPALTANET GATMPTTPSD |
| hrv-27 | AKQ....... .......TIA SVSSNSKHTQ KVPTLSASET GTTLPTVPSD |
| ef173421-27 | AKQ....... .......TIA SVSSNSKHTQ KVPTLSASET GTTLPTVPSD |
| dq473487-35 | TKQ....... .......TVA SIASGSKHTQ SVPMLTANET GASMPVEPSD |
| hrv-35 | TKQ....... .......TVA SIASGSKHTQ SVPTLTANET GASMPVXPSD |
| ef173423-37 | TKQ....... .......TLA SISSGPKHTQ SVPTLTANET GATMPTNPSD |
| hrv-42 | TQQ....... .......TLA SVKSGSKHTQ KVPSLTANET GATLPTTPSD |
| dq473488-48 | MKQ....... .......ITA SSQSGPKHTQ KVPALSANET GATLPTNPSD |
| hrv-52 | MRQ....... .......ITA SSQSGPKHTQ KVPALSASET GATLPTNPSD |
| hrv-52-f10 | MRQ....... .......ITA SSQSGSKHTQ KVPALSASET GATLPTNPSD |
| ef173424-52 | MRQ....... .......ITA SSQSGPKHTQ KVPALSASET GATLPTNPSD |
| hrv-69 | MKQ....... .......VTA SVQSGSKHTQ KVPALSASET GATLPTNPSD |
| dq473489-70 | MKQ....... .......VTA SSQSGPKYTQ KVPALSANET GATLPTNPSD |
| hrv-72 | TKQ....... .......TLA SISSGPKYTQ SVPTLTANET GATMPTLPSD |
| hrv-79 | TRQ....... .......TLA SVSSGPKHTQ SVPTLTANET GATMPTQPSD |
| hrv-83 | TRQ....... .......TLA SVASGPKHTQ SVPILTANET GATMPTQPSD |
| hrv-84 | AKQ....... .......TIA SINSNSKHTQ QVPTLSASET GATLQTVPSD |
| hrv-86 | TKQ....... .......TLA SVATGSKYTQ KVPSLSANET GATMPTVPSD |
| hrv-91 | MKQ....... .......VTA SSQSGSKYTQ KVPALSANET GATLPTDPSD |
| hrv-92 | TKQ....... .......TLA SITSGPKHTQ SVPTLTANET GATMPTQPSD |
| ef173425-93 | AKQ....... .......TIA SVVSNSKHTQ KVPTLSASET GATLPTVPSD |
| hrv-97 | AKQ....... .......TIA SASSISKHTQ KVPTLSASET GATLPTVPSD |
| hrv-99 | TRQ....... .......TLA SIKSDSKHTQ KVPALTANET GATLPTKPSD |
| | 651 700 |
| annotation | HH........ ....HHHZHH HHH..BBBBB BBBBB..... .......... |
| af499637-cva13 | TVQTRHVIQT RSRSESTVES FFARGACVTI MGVDN.YNET LKG....... |
| af546702-cva21 | VVETRHVVNY KTRSESCLES FFGRAACVTI LSLTNSSKS. .......... |
| v01149-pv1m | TVQTRHVVQH RSRSESSIES FFARGACVTI MTVDNPASTT N......... |
| d00239-01 | AIETRYVMTS QTRDEMSIES FLGRSGCVHI SRIKVDYND. .........Y |
| pico-01 | AIETRYVITS QTRDEMSIES FLGRSGCVHI SRIKVDYTD. .........Y |
| hrv-01 | AIETRYVITS QTRDEMSIES FLGRSGCVHI SRIKVDYTD. .........Y |
| x02316-02 | VIETRYVQTS QTRDEMSLES FLGRSGCIHE SKLEVTLAN. .........Y |
| hrv-07 | MIETRYVITD QTRDETSIES FLGRSGCIAK VKLDTTQGD. .........Y |
| dq473503-07 | MIETRYVITD QTRDETSIES FLGRSGCIAK VKLDTTQGD. .........Y |
| hrv-08 | LIETRYVITD QTRHETSLES FLGRAGCIKI IALELDHDN. .........Y |
| pico-09 | MIETRYVQTS QTRDEMSLES FLGRSGCIHI SKLNIDYSN. .........Y |
| hrv-09 | MIETRYVQTS QTRDEMSLES FLGRSGCIHI SKLNIDYSD. .........Y |
| hrv-09-f01 | MIETRYVQTS QTRDEMSLES FLGRSGCIHI SKLNVDYDN. .........Y |
| hrv-09-f02 | MIETRYVQTS QTRDEMSLES FLGRSGCIHI SKLNVDYDN. .........Y |
| dq473498-10 | TVETRYVQTS QTRDEMSIES FLGRSGCIHT STITVNNTRP .........Y |
| hrv-10 | TVETRYVQTS QTRDEMSIES FLGRSGCIHT STITVNNTRP .........Y |
| ef173414-11 | MIETRYVQTS QTLDEMSIES FLGRSGCIHM SKLIVQYED. .........Y |
| ef173415-12 | VIETRYVITD QTRDEMSIES FLGRSGCISI IELDLDHEG. .........Y |
| hrv-13 | MVETRYVQTS QTRDEMSVES FLGRSGCIHM STMNIDYTN. .........Y |
| hrv-13-f03 | MVETRYVQTS QTRDEMSVES FLGRSGCIYM HTMNIDYDA. .........Y |
| dq473493-15 | MIETRYVQTS QTRDEMSIES FLGRSGCVHI SDLKIHYED. .........Y |
| 124917-16 | TIETRYVQSS QTLDEMSVES FLGRSGCIHE SVLDIVDN.. .........Y |
| hrv-18 | MIETRYVQTS QTRDEMSIES FLGRSGCIHI SKLVVHYED. .........Y |
| hrv-19 | MIETRYVQTS QTRDEMSIES FLGRSGCVHV SELQLDYTN. .........Y |
| hrv-20 | MVETRYVITD QTRDEMSVES FLGRSGCIAI IHTDLDHEAQ Q........Y |
| hrv-21 | MVETRYVQTS QTRDEMSIES FLGRSGCIHM SKLVVNYDN. .........Y |
| hrv-22 | MIETRYVLNS QTRDEMSIES FLGRSGCIHI SHLEVKYTG. .........Y |
| dq473497-23 | VIETRYVQTS QTRDEMSLES FLGRSGCIHE SKLKVEIGN. .........Y |
| hrv-24 | MVETRYVQTS QTLDEMSVES FLGRSGCIHM SKLTVDYDN. .........Y |
| ef173416-24 | MVETRYVQTS QTLHEMSVES FLGRSGCIHM SKLTVDYDN. .........Y |
| hrv-25 | TIETRYVQTT QTRDEMSIES FLGRSGCVHT STIETKLKH. .......... |
| dq473508-28 | MVETRYVITD QTRDEMSIES FLGRSSCIAI IHTDVVHETD K........Y |
| hrv-29 | TIETRYVQTS HTRDEMSIES FLGRSGCIHV STIKANQAH. .......... |
| dq473512-30 | VIETRYVQTS QTRDEMSLES FLGRSGCIHE SKLELELAH. .........Y |
| hrv-30 | VIETRYVQTS QTRDEMSLES FLGRSGCIHE SKLELELAR. .........Y |
| hrv-31 | TIETRYVQTS QTRDEMSIES FLGRSGCVHT SIIEPDGLH. .......... |
| hrv-32 | MIETRYVQTT HTRDEMSLES FLGRSGCVHI SKLDIDYTN. .........Y |
| hrv-33 | MIETRYVQTS QTLDEMSVES FLGRSGCIHM SKLVVKYED. .........Y |
| hrv-34 | MIETRYVQTS QTRDEMSIES FLGRSGCIHM SKLVVDYEN. .........Y |
| dq473501-34 | MIETRYVQTS QTRDEMSIES FLGRSGCIHM SKLVVDYEN. .........Y |
| dq473505-36 | MIETRYVITD QTRDETSIES FLGRSGCIAM IEFSTSSDKD EH........ |
| hrv-38 | MIETRYVQTS QTRDEMSVES FLGRSGCVHI SNLDIDYIN. .........Y |
| dq473495-38 | MIETRYVQTS QTRDEMSVES FLGRSGCVHI SNLDIDYIN. .........Y |
| ay751783-39 | TIETRYVQTS HTRDEMSVES FLGRSGCIHI STITMKKEN. .........Y |
| hrv-40 | TIETRFVQTS QTRDEMSIES FLGRSGCIHI STITVDNSLE .........Y |
| dq473491-41 | MIETRYVQTS QTRDEMSIES FLGRSGCVHK STLNIDYTD. .........Y |
| hrv-43 | MVETRSVHNF QTRDEMSIES FLGRSGCIHI STLEVNYDD. .........Y |
| dq473499-44 | TIETRYVQTS QTRDEMSIES FLGRSGCIHV STIKTNQAHN .......... |
| hrv-45 | LIETRYVIAD QTRHETSIES FLGRAGCVAT ISLDINHDD. .......... |
| dq473506-46 | MIETRYVITD QTKDEMSIES FLGRSGCIAI IETELNHEEG K........Y |
| hrv-47 | TIETRYVQTA QTRDEMSIES FLGRSGCVHS STIQSNEQH. .......... |
| dq473496-49 | VIETRYVQTS QTRDEMSLES FLGRSGCIHE SKLEVTLTN. .........Y |
| hrv-49-f04 | VIETRYVQTS QTRDEMSLES FLGRSGCIHE SKLEVTLTN. .........Y |
| hrv-50 | MLETRYVQTS QTRDEMSIES FLGRSGCIHI SKLVVDYDG. .........Y |
| hrv-51 | MVETRYVVTD QTRDEMSIES FLGRSACVAI IHTNLEHVEA DRQA.....Y |
| dq473507-53 | MLETRYVITD QTRDEMSIES FLGRSSCIAE IHTNLDHTG. .........Y |
| hrv-54 | TIETRFVQTS QTRDEMSIES FLGRAGCIHE STITIQNDVE .........Y |
| hrv-54-f05 | TIETRYVQTS QTRDEMSIES FLGRAGCIHE STITIRNDVE .........Y |
| dq473511-55 | VIETRYVQTS QTRDEMSIES FLGRSGCVHI SELVVHYEE. .........Y |
| hrv-56 | TIETRYVQTS QTRDEMSIES FLGRSGCIHI STITVDNDVD .........Y |
| hrv-57 | MIETRYVQTS QTRDEMSLES FLGRSGCIHI SELIVDYDN. .........Y |
| hrv-58 | MIETRYVITD QTRDETSIES FLGRSGCIAI IKFNTNKTN. .........Y |
| dq473500-59 | TIETRYVQTS QTRDEMSVES FLGRSGCIHI STITVNKDIK .........Y |
| hrv-60 | VIETRYVQIT QTRDEMSVES FLGRSGCIHI SKLEIDYSN. .........Y |
| hrv-61 | MIETRYVQTS QTRDEMSVES FLGRSGCIHM STLNINYDN. .........Y |
| hrv-62 | TIETRYVQTT QTRDEMSIES FLGRSGCVHT STIETTLSH. .......... |
| hrv-63 | TVETRYVQTS QTRDEMSVES FLGRSGCIHI STITVDKTID .........Y |
| hrv-64 | MIETRYVQNT QTRDEMSIES FLGRSGCIHI SDLKVNYTG. .........Y |
| ef173417-64 | MIETRYVQNT QTRDEMSIES FLGRSGCIHI SDLKVNYTG. .........Y |
| hrv-65 | VIETRYVITD QTRDEMSVES FLGRSACIAV IHTDLKHDHE GQNV.....Y |
| hrv-66 | TVETRYVQTS QTRDEMSIES FLGRSGCIHI STINVDSTKT .........Y |
| hrv-67 | MIETRYVQAS NTRDEMSLES FLGRSGCIHI SKLNIDYNA. .........Y |
| hrv-68 | VVETRYVITD QTRDEMSIES FLGRSGCIAI IHTDLDHNED Q........Y |
| hrv-71 | VMETRYVITD QTRDEMSIES FLGRSACIAT IHTKLVHGEE GV.......Y |
| dq473492-73 | MIETRYVQTS QTRDEMSIES FLGRSGCIHM STMNINYEN. .........Y |
| dq473494-74 | MVETRYVQTS QTRDEMSVES FLGRSGCIHI SHLKIDYTN. .........Y |
| dq473510-75 | MLETRQVQNF QTRDEMSIES FLGRSGCIHI STLEIDYTN. .........Y |
| dq473502-76 | MVETRYVQTS QTLDEMSMES FLGRSGCIHI SKLVVEYEG. .........Y |
| hrv-76 | MVETRYVQTS QTLDEMSMES FLGRSGCIHI SKLVVEYEG. .........Y |
| hrv-77 | TVETRYVQTS QTRDEMSIES FLGRSGCIHI STINVEDGKT .........Y |
| hrv-78 | TIETRYVITD QTRDEMSIES FLGRSGCATI MRLELDHTD. .........Y |
| ef173418-78 | TIETRYVITD QTRDEMSIES FLGRSGCATI MRLELDHTD. .........Y |
| hrv-80 | MIETRYVITD QTKDEMSIES FLGRSGCVAI IETKLNHETD M........Y |
| hrv-81 | TIETRYVQSS QTLDEMSVES FLGRSGCIHE SILDI.KED. .........Y |
| hrv-81-f06 | TIETRYVQSS QTLDEMSVES FLGRAGCIHE SILDI.KED. .........Y |
| hrv-81-f07 | TIETRYVQSS QTLDEMSVES FLGRAGCIHE SILDI.KED. .........Y |
| hrv-82 | MIETRYVQTS QTRDEMSLES FLGRSGCIHI SHLNVRYTD. .........Y |
| dq473509-82 | MIETRYVQTS QTRDEMSLES FLGRSGCIHI SHLNVKYTD. .........Y |
| hrv-85 | TIETRFVQTS QTRDEMSLES FLGRSGCIHI STITVNNNLD .........Y |
| pico-85 | TIETRFVQTS QTRDEMSLES FLGRSGCIHI STITVNNNLD .........Y |
| dq473504-88 | MIETRYVITD QTRDETSIES FLGRSGCIAK IKLDTNEGD. .........Y |
| a10937-89 | MIETRYVITD QTRDETSIES FLGRSGCIAM IEFNTSSDKT E......... |
| hrv-89 | MIETRYVITD QTRDETSIES FLGRSGCIAM IEFNTSSDKT E......... |
| hrv-89-f08 | MIETRYVITD QTRDETSIES FLGRSGCIAM IEFNTSSDKV E......... |
| hrv-89-f09 | MIETRYVITD QTRDETSIES FLGRSGCIAM IEFNTSSDKV E......... |
| m16248-89 | MIETRYVITD QTRDETSIES FLGRSGCIAM IEFNTSSDKT E......... |
| hrv-90 | VVETRYVQTS QTRDEMSVES FLGRSGCIHM SKLVVNYDN. .........Y |
| hrv-94 | MIETRYVQNT QTRDEMSIES FLGRSGCIHI AHLEIKYDG. .........Y |
| ef173419-94 | MIETRYVQNT QTRDEMSIES FLGRSGCIHI AHLEIKYDG. .........Y |
| hrv-95 | LIETRYVITD QTRYETSLES FLGRAGCIKI IALELDHDN. .......... |
| hrv-96 | MIETRYVQTS QTRDEMSIES FLGRSGCIHM STLNIDYDN. .........Y |
| hrv-98 | TIETRYVQTS QTRDEMSIES FLGRAGCIHE STITIQNDVE .........Y |
| hrv-100 | TVETRYVQTS QTRDEMSIES FLGRSGCIHT STITVSKMKN .........Y |
| ef186077-qpm | LIETRYVMND NTNAEAAVEN FLGRSA.LWA NLRLD..... .......... |
| ef077279-nat001 | LIETRYVMND NTNAEATVEN FLGRSA.LWA NFTLD..... .......... |
| ny1078 | MIETRYVMNS NTNAEAAVEN FLGRSA.LWA NLTLQ..... .......... |
| ef582385-c024 | LIETRYVINS NTNSEALIEN FMGRSA.LWA KIQVA..... .......... |
| ef077280-nat045 | VIETRYVINN HTNNEALMEN FLGRSS.LWA ELQMS..... .......... |
| ef582387-c026 | LIETRYVMND NTNAEATVEN FLGRSA.LWA NLKLN..... .......... |
| ef582386-c025 | MIETRYVVNS RTNGEATIEN FLGRSA.LWA NIDMA..... .......... |
| dq473485-03 | NVETRTTYMH FNGSETDVES FLGRAACVHV TEIKNKNAAG LD........ |
| ef173422-03 | NVETRTTYMH FNGSETDVES FLGRAACVHV TEIKNKNAAG LD........ |
| dq473490-04 | NVETRTTLMH YRGSETTLEN FLGRAACVHV VEIKNKR..V TDD......T |
| hrv-05 | SVETRTTLMH YTGSETTLEN FLGRAACVHV VEIVNKRPTD TEE....... |
| dq473486-06 | NVETRTTYMH FNGSETDVES FLGRAACVHI TEIENKNPAD IQ....... |
| 105355-14 | SIETRTTYMH FNGSETDVEC FLGRAACVHV TEIQNKDATG ID....... |
| k02121-14 | SIETRTTYMH FNGSETDVEC FLGRAACVHV TEIQNKDATG ID....... |
| ef173420-17 | NVETRTTYMH FTGSETSLEN FLGRSACVHI TEIQNKLPTE PRKEGDRMIN |
| hrv-26 | SVETRTTLMH YVGSETTLEN FLGRAACVHV VEIKNKEPQD V......... |
| hrv-27 | NIETRTTYMH YDGTETSLES FLGRAACVHV ITIENKLPTT GQ........ |
| ef173421-27 | NIETRTTYMH YDGTETSLES FLGRAACVHV ITIENKLPTT GQ........ |
| dq473487-35 | SVETRLTYMH FKGSETDVES FLGRAACVHM TEIVNKNPAG ST........ |
| hrv-35 | SVETRLTYMH FKGSETDVES FLGRAACVHM TEIVNKNPAX ST........ |
| ef173423-37 | NVETRTTYMH FNGSETDIES FLGRAACVHI TEIENKNSTG SV........ |
| hrv-42 | SVETRTTMMH YTGSETTLEN FLGRAACVHV VEIRNKRPTD GE........ |
| dq473488-48 | NVETRTTYMH FSGSETTLEN FLGRSACVHI TEIQNKRPEE FTSEETA..K |
| hrv-52 | NVETRTTYMH FTGSETTLEN FLGRSACVHI TEIENEIPQN PTPEGT...N |
| hrv-52-f10 | NVETRTTYMH FNGSETTLEN FLGRSACVHI TEIENKVPQD PTPEGG...N |
| ef173424-52 | NVETRTTYMH FTGSETTLEN FLGRSACVHI TEIENEIPQN PTPEGT...N |
| hrv-69 | SVETRTTYMH FTGSETTIEN FLGRSACVHI TEIQNKKPIE SLEEGK...N |
| dq473489-70 | NVETRTTYMH FTGSETSLEN FLGRSACVHI TEIKNKLPTE PVMKGNNMEN |
| hrv-72 | NVETRTTYMH FNGSETDIEC FLGRAACVHV TEIENKNPNG IS........ |
| hrv-79 | NVETRTTYMH FNGSETDVES FLGRAACVHM VKIVNKNPTD IV........ |
| hrv-83 | NVETRTTYMH FNGSETDIES FLGRAACVHM VEIVNKNPLN IK........ |
| hrv-84 | NVETRKTYMH YDGAETSVES FLGRSACVHV TEIENKSPAT DM........ |
| hrv-86 | NIETRTTYMN FTGSETDVEC FLGRAACVHI TEIENKDPTD IE........ |
| hrv-91 | NVETRTTYMH YTGSETTLEN FLGRSACVHI TEIQNKLPIK PTEEGGNMKN |
| hrv-92 | NVETRTTYMH FNGSETDVEN FLGRAACVHM VEIVNKNPEG LE........ |
| ef173425-93 | NVETRTTYMH YDGTETSLES FLGRAACVHV TDIENKLPTR ES........ |
| hrv-97 | NVETRTTYMH YDGTETSIES FLGRAACVHV TDIENKLPNT TD........ |
| hrv-99 | SVETRTTLMH YTGSETTLEN FLGRAACVHV VEIRNKRPTD EI........ |
| | 701 750 |
| annotation | HHHHHHH.BB CBB.....HH HAHHHHHHBB BBBBBBBDBB BBBB...... |
| af499637-cva13 | .DQKSTLFTT WNITYTDTVQ LRRKLEMFTY SRFDIEFTFV VTERYYSSNS |
| af546702-cva21 | .GEEKKHFNI WNITYTDTVQ LRRKLEFFTY SRFDLEMTFV FTENYPSTAS |
| v01149-pv1m | ...KDKLFAV WKITYKDTVQ LRRKLEFFTY SRFDMELTFV VTANFTETNN |
| d00239-01 | NGVN.KNFTT WKITLQEMAQ IRRKFELFTY VRFDSEVTLV PCIAG...RG |
| pico-01 | NGQD.INFTK WKITLQEMAQ IRRKFELFTY VRFDSEITLV PCIAG...RG |
| hrv-01 | NGQD.INFTK WKITLQEMAQ IRRKFELFTY VRFDSEITLV PCIAG...RG |
| x02316-02 | N..KE.NFTV WAINLQEMAQ IRRKFELFTY TRFDSEITLV PCISA...LS |
| hrv-07 | DTGKGVGFTT WKISLQEMAQ IRRKFELFTY TRFDSEITIV TAAAA...QG |
| dq473503-07 | DTGKGVGFTT WKISLQEMAQ VRRKFELFTY TRFDSEITIV TAAAA...QG |
| hrv-08 | DE....SFRT WGINIQEMSQ IRRKFEMFTY VRFDSEITIV PCIAA...IK |
| pico-09 | DK.SVENFTI WKINIKEMAQ LRRKFELFTY ARFDSEITLV PCIAA...ES |
| hrv-09 | DK.SVENFTI WKINIKEMAQ IRRKFELFTY ARFDSEITLV PCIAA...ES |
| hrv-09-f01 | DK.SVKNFTI WKINIKEMAQ IRRKFELFTY ARFDSEITLV PCIAA...ES |
| hrv-09-f02 | DK.SVKNFTI WKINIKEMAQ IRRKFELFTY ARFDSEITLV PCIAA...ES |
| dq473498-10 | NE...HTFDT WQITLQEMAQ IRRKFEMFTY VRFDSEVTLV PCIAG...KG |
| hrv-10 | NE...HTFDT WQITLQEMAQ IRRKFEMFTY VRFDSEVTLV PCIAG...KG |
| ef173414-11 | NG..KKNFNT WKINLQEMAQ IRRKFEMFTY TRFDSEITLV PCIAA...KG |
| ef173415-12 | SAE.GKNFKT WKINLKEMAQ IRRKNELFTY LRFDSEITIV PSNAA...IE |
| hrv-13 | DD.SVNNFVK WKISLQEMAQ VRRKFELFTY VRFDSEITIV PCIAG...QG |
| hrv-13-f03 | DD.SVNNFVK WKISLQEMAQ VRRKFELFTY VRFDSEITIV PCIAG...QG |
| dq473493-15 | NKD.GKNFTK WQINLKEMAQ IRRKFELFTY VRFDSEITLV PCIAA...KS |
| 124917-16 | NDQ...SFTK WNINLQEMAQ IRRKFEMFTY ARFDSEITMV PSVAA...KD |
| hrv-18 | NAE.TRNFVK WQINLQEMAQ IRRKFEMFTY VRFDSEITLV PSVAA...KG |
| hrv-19 | NQE.NNNFKT WQINLKEMAQ IRRKFELFTY LRFDSEVTLV PCIAA...KS |
| hrv-20 | NA.PGKNFSQ WKITIKEMAQ IRRKCELFTY LRFDSEITIV ATVAA...LG |
| hrv-21 | NT.GENNIST WQINIKEMAQ IRRKFEMFTY TRFDSEITLV PSIAA...RA |
| hrv-22 | NE.EGNNFNI WQINLKEMAQ IRRKFELFTY LRFDSEITLV PCIAS...QS |
| dq473497-23 | DE...NNFNT WNINLQEMAQ IRRKFELFTY TRFDSEITLV PCISA...LS |
| hrv-24 | DT...KNFFK WQINLQEMAQ VRRKFELFTY TRFDSEITIV PSIAG...KG |
| ef173416-24 | DT...KNFFK WQINLQEMAQ VRRKFELFTY TRFDSEITIV PSIAG...KG |
| hrv-25 | ...DER.FKT WNINLQEMAQ IRRKFEMFTY VRFDSEITLV PSIAG...RG |
| dq473508-28 | NH.PGKNFSK WNITLKEMAQ IRRKCEMFTY LRFDSEITIV VSVAS...KG |
| hrv-29 | ...DAK.FDK WNVNLQEMAQ IRRKFEMFTY VRFDSEITLV PCIAG...RG |
| dq473512-30 | DK...KNFTT WNINLQEMAQ IRRKFELFTY TRFDSEITLV PCISA...LS |
| hrv-30 | DK...KNFTT WNINLQEMAQ IRRKFELFTY TRFDSEITLV PCISA...LS |
| hrv-31 | ...DSK.YKV WHINLQEMAQ IRRKFEMFTY VRFDSEVTIV PCIAG...HG |
| hrv-32 | NK.SVKNFTI WKINIKEMAQ IRRKFELFTY TRFDSEITLV PCIAA...ES |
| hrv-33 | NE..KKNFMT WKINLQEMAQ IRRKFEMFTY ARFDSEITLV PSIAA...QG |
| hrv-34 | NA.KTKNFMT WQINLQEMAQ IRRKFEMFTY VRFDSEVTLV PSIAA...KG |
| dq473501-34 | NA.KTKNFMT WQINLQEMAQ IRRKFEMFTY VRFDSEVTLV PSIAA...KG |
| dq473505-36 | DK.IGKGFKT WKISLQEMAQ IRRKYELFTY TRFDSEITIV TAAAV...QG |
| hrv-38 | NS.EDKNFTT WQINLKEMAQ IRRKFEMFTY VRFDSEVTLV PCIAA...QN |
| dq473495-38 | NS.EDKNFTT WQINLKEMAQ IRRKFEMFTY VRFDSEVTLV PCIAA...QN |
| ay751783-39 | NE...HNFVD WKITLQEMAQ VRRKFEMFTY VRFDSEITLV PCIAG...RG |
| hrv-40 | DD...HHFDK WQITIQEMSQ IRRKFEFFTY ARFDSEITLV PCIAG...KG |
| dq473491-41 | DD.SIQNFKK WKISLQEMAQ IRRKFELFTY VRFDSEITIV PSIAG...QG |
| hrv-43 | NG.TGKNFTQ WPINLQEMAQ IRRKYELFTY LRFDSEITLV PCIAA...KS |
| dq473499-44 | ....TK.FDK WNINLQEMAQ IRRKFEMFTY VRFDSEITLV PCIAG...HG |
| hrv-45 | ...YQKNYKN WAISLQEMSQ IRRKFEMFTY VRFDSEITIV PCVAA...TE |
| dq473506-46 | NAED.QNFSK WKMTLLEMAQ IRRKCELFTY LRFDSEITIV TTLAG...QG |
| hrv-47 | ...INK.FKV WHINLQEMAQ IRRKYEMFTY VRFDSEVTMV PCIAG...YG |
| dq473496-49 | NE...NNFKV WNINLQEMAQ IRRKFELFTY TRFDSEITLV PCISA...LS |
| hrv-49-f04 | NE...NNFKV WNINLQEMAQ IRRKFELFTY TRFDSEITLV PCISA...LS |
| hrv-50 | NEE.TKNFKK WQINLQEMAQ IRRKFEMFTY VRFDSEVTLV PSIAA...KG |
| hrv-51 | NA.KGKNFST WKITLKEMAQ IRRKCELFTY LRFDSEITIV ATIAG...QG |
| dq473507-53 | NE.PGKNHSE WKITLKEMAQ IRRKCEMFTY LRFDSEITIV VSVAS...KQ |
| hrv-54 | ND...HHFKK WDITLQEMAQ IRRKFEFFTY VRFDSEITLV PCIAG...KG |
| hrv-54-f05 | ND...HHFKK WDITLQEMAQ IRRKFEFFTY VRFDSEITLV PCIAG...KG |
| dq473511-55 | NK.EGKNFTK WQVNIQEMAQ IRRKFEMFTY TRFDSEVTLV PSIAA...KG |
| hrv-56 | N...SKHYNK WQITLQEMAQ VRRKFEFFTY VRFDSEVTLV PCVAG...KG |
| hrv-57 | N...TKNFTE WKINLQEMAQ IRRKFELFTY VRFDSEVTLV PSIAA...QG |
| hrv-58 | DD.IGVGYKT WKISLQEMAQ IRRKFELFTY TRFDSEITIV TAAAA...QG |
| dq473500-59 | DD..GH.FLK WPITLQEVAQ IRRKFEFFTY VRFDSEITLV PCIAG...KG |
| hrv-60 | NE.ENKNFTT WQINLKEMAQ IRRKFELFTY VRFDSELTLV PCIAA...KN |
| hrv-61 | DD.SIENFKV WKINLQEMAQ IRRKFELFTY ARFDSEITIV PCVAG...QG |
| hrv-62 | ....KDRFKT WNINLQEMAQ IRRKFEMFTY VRFDSEITLV PSIAG...RG |
| hrv-63 | DT..GH.FNK WQITLQEMAQ IRRKFEFFTY VRFDSEVTLV PCIAG...KG |
| hrv-64 | NDE.GNNFNK WQITLKEMAQ IRRKYELFTY VRFDSEITLV PCISS...QS |
| ef173417-64 | NDE.GNNFNK WQITLKEMAQ IRRKYELFTY VRFDSEITLV PCISS...QS |
| hrv-65 | NDE.GRNFSA WEITLKEMAQ IRRKCELFTY LRFDSEITIV ATIAG...QG |
| hrv-66 | DE...SKFRT WQITLQEMAQ IRRKFEMFTY VRFDSEITLV PCIAG...KG |
| hrv-67 | DE.SRDNFTI WKINIKEMAQ IRRKFELFTY TRFDSEITLV PCIAA...ES |
| hrv-68 | NA.PGKNFSQ WKITIKEMAQ IRRKCELFTY LRFDSEITIV ATIAA...LG |
| hrv-71 | NM.KGNNLSK WQITLKEMAQ IRRKCELFTY LRFDSEITIV ATLAG...QG |
| dq473492-73 | DD.APENFTK WKISLQEMAQ IRRKFELFTY VRFDSEVTIV PCIAG...QS |
| dq473494-74 | NVE.GKNFTK WQINLKEMAQ IRRKFELFTY VRFDSEVTLV PCIAA...KS |
| dq473510-75 | NGE.GKNFTQ WPINLQEMAQ IRRKYELFTY LRFDSEVTLV PCIAA...KG |
| dq473502-76 | DD..TKNFKT WKINLQEMAQ VRRKFEMFTY TRFDSEVTLV PSIAA...KG |
| hrv-76 | DD..TKNFKT WKINLQEMAQ VRRKFEMFTY TRFDSEVTLV PSIAA...KG |
| hrv-77 | DE..SK.FRK WQITLQEMAQ IRRKFEMFTY VRFDSEITLV PCIAG...KG |
| hrv-78 | NA.EGKNFTT WKINLQEMAQ IRRKNEMFTY LRFDSEITLV CAVAS...QG |
| ef173418-78 | NAE.GKNFTT WKINLQEMAQ IRRKNEMFTY LRFDSEITLV CAVAS...QG |
| hrv-80 | NA.DGQNFSK WKITLMEMAQ IRRKCELFTY LRFDSEITIV TTLAG...QG |
| hrv-81 | NT...QSFTK WKINLQEMAQ IRRKFEMFTY TRFNSEITLV PSIAN...KE |
| hrv-81-f06 | NT...QSFTK WKINLQEMAQ IRRKFEMFTY TRFDSEITLV PSIAN...KE |
| hrv-81-f07 | NT...QSFTK WKINLQEMAQ IRRKFEMFTY TRFDSEITLV PSIAN...KE |
| hrv-82 | NE..GNNFRS WQISIKEMAQ IRRKFELFTY VRFDSEITLV PCIAS...QS |
| dq473509-82 | NEK..NNFRS WPISIKEMAQ IRRKFELFTY VRFDSEITLV PCIAS...QS |
| hrv-85 | DE...NHFDQ WQITIQEMAQ IRRKFEFFTY TRFDSEITLV PCIAG...KG |
| pico-85 | DE...NHFDQ WQITIQEMAQ IRRKFEFFTY TRFDSEITLV PCIAG...KG |
| dq473504-88 | DT.IGVGFVT WKISLQEMAQ IRRKFELFTY TRFDSEITIV TAAAA...QG |
| a10937-89 | HDKIGKGFKT WKVSLQEMAQ IRRKYELFTY TRFDSEITIV TAAAA...QG |
| hrv-89 | HDKIGKGFKT WKXSLQEMAQ IRRKYELFTY TRFDSEITIV TAAAA...QG |
| hrv-89-f08 | HDKIGKGFKT WKISLQEMAQ IRRKFELFTY TRFDSEITIV TAAAT...KG |
| hrv-89-f09 | HDKIGKGFKT WKISLQEMAQ IRRKFELFTY TRFDSEITIV TAAAT...KG |
| m16248-89 | HDKIGKGFKT WKVSLQEMAQ IRRKYELFTY TRFDSEITIV TAAAA...QG |
| hrv-90 | DE...NNFHK WQINLQEMAQ IRRKFELFTY ARFDSEITIV PSIAG...KG |
| hrv-94 | ND.AGNNFQS WQITLKEMAQ IRRKFELFTY VRFDSEITLV PCISS...QS |
| ef173419-94 | ND.AGNNFQS WQITLKEMAQ IRRKFELFTY VRFDSEITLV PCISS...QS |
| hrv-95 | ...YDKNFRT WGINIQEMSQ IRRKFEMFTY VRFDSEITIV PCIAA...IE |
| hrv-96 | DD.SPKNFKV WKINLQEMAQ IRRKFELFTY ARFDSEITIV PCVAV...QS |
| hrv-98 | ND...HHFRQ WDITLQEMAQ IRRKFEFFTY VRFDSEVTLV PCIAG...KG |
| hrv-100 | NE...HTFDK WQITLQEMAQ IRRKFEMFTY VRFDSEITLV PCIAG...KG |
| ef186077-qpm | .....QGFRK WEINFQEHAQ VRKKFEMFTY VRFDLEITIV T.....NNKG |
| ef077279-nat001 | .....RSFKS WKINFQEHAQ IRKKFELFTY VRFDLEITIV T.....NNRG |
| ny1078 | .....NSFVA WDINFQEHAQ VRKKFEMFTY VRFDLEITIV T.....NNAG |
| ef582385-c024 | .....NGFAK WDINFQEHAQ VRKKFEMFTY ARFDMEVTVV T.....NNTG |
| ef077280-nat045 | .....DGFKK WDINFQEQAH IRKKIEMFTY IRFDMEVTIV T.....NNQG |
| ef582387-c026 | .....QGFKE WKINFQEHAQ VRKKFEMFTY VRFDLEVTIV T.....NNTG |
| ef582386-c025 | .....NGYAT WSITYQGNAQ IRKKLELFTY VRFDLEITII T.....SNSS |
| dq473485-03 | NHRKEGLFND WKINLSSLVQ LRKKLELFTY VRFDSEYTIL ATAS.QPEAS |
| ef173422-03 | NHRKEGLFND WKINLSSLVQ LRKKLELFTY VRFDSEYTIL ATAS.QPEAS |
| dq473490-04 | KHKEELLFND WKISLSSLVQ LRRKLELFTY VRFDSEYTII ATSS.QPEDA |
| hrv-05 | .HRMQLLFNN WKINLSSLVQ LRRKLEMFTY VRFDSEYTII ATSS.QPNEA |
| dq473486-06 | NQKEEKLFND WKINFSSLVQ LRKKLELFTY IRFDSEYTIL ATAS.QP.KS |
| 105355-14 | NHREAKLFND WKINLSSLVQ LRKKLELFTY VRFDSEYTIL ATAS.QPDSA |
| k02121-14 | NHREAKLFND WKINLSSLVQ LRKKLELFTY VRFDSEYTIL ATAS.QPDSA |
| ef173420-17 | THKEQGLFND WKISLSSLVQ FRKKLELFTY VRFDSEYTIL ATAS.QPNTA |
| hrv-26 | NHKSELLFND WKINLSSLVQ LRRKIELFTY VRFDSEYTII ATSS.QPNNA |
| hrv-27 | THKEQKLYND WKINLSSLVQ LRRKLEMFTY VRFDSEYTII ATSS.QPQAA |
| ef173421-27 | THKEQKLYND WKINLSSLVQ LRRKLEMFTY VRFDSEYTII ATSS.QPQAA |
| dq473487-35 | NQKQDKLFND WRINLSSLVQ FRKKLELFTY VRFDSEYTIL ATAS.QPDNS |
| hrv-35 | NQKQDKLFND WRINLSSLVQ FRKKLELFTY VRFDSEYTIL ATAS.QPDNS |
| ef173423-37 | NHKSDKLFND WKINLSSLVQ LRKKLELFTY VRFDSEYTIL ATAS.QPSKS |
| hrv-42 | EHKTQLLFND WKINLSSLVQ LRRKLEMFTY VRFDSEYTII ATSS.QPNDA |
| dq473488-48 | THKEQKLFND WKISLSSLVQ LRKKLELFTY VRFDSEYTIL ATAS.QPDQA |
| hrv-52 | THKEQKLFSD WKVNLSSLVQ LRKKLELFTY VRFDSEYTIL ATAS.QPETA |
| hrv-52-f10 | THKEQKLFND WKISLSSLVQ LRKKLELFTY VRFDSEYTIL ATAS.QPEAA |
| ef173424-52 | THKEQKLFSD WKVNLSSLVQ LRKKLELFTY VRFDSEYTIL ATAS.QPETA |
| hrv-69 | THKGQMLFND WKISLSSLVQ LRKKLELFTY VRFDSEYTIL ATAS.QPNAS |
| dq473489-70 | THKEQGLFND WKINLSSLVQ FRKKLELFTY VRFDSEYTIL ATAS.QPDTA |
| hrv-72 | NHKAEKLFND WKISLSSLVQ LRKKLELFTY VRFDSEYTIL ATAS.QPDTA |
| hrv-79 | NQKEHLLFND WRINLSSLVQ LRKKLELFTY IRFDSEYTIL ATAS.QPNDS |
| hrv-83 | NQKREKLFNE WRINLSSLVQ LRKKLELFTY ARFDSEYTIL ATAS.QPTNS |
| hrv-84 | NHKNQKLFDD WKINLSSLVQ LRRKLEFFTY VRFDSEYTII ATSS.QPNDA |
| hrv-86 | NQKEAKLFND WKINLSSLVQ LRKKLELFTY VRFDSEYTIL ATAS.QPTQS |
| hrv-91 | THKEQKLFND WKINLSSLVQ FRKKLELFTY VRFDSEYTIL ATAS.QPETA |
| hrv-92 | NQKEHKLFND WRINLSSLVQ LRKKLELFTY VRFDSEYTIL ATAS.QPTSS |
| ef173425-93 | THKEQKLYND WKINLSSLVQ LRRKLDMFTY VRFDSEYTII ATSS.QPQDA |
| hrv-97 | NHKAQKLFND WKINLSSLVQ LRRKLDMFTY VRFDSEYTII ATSS.QPERA |
| hrv-99 | EHKKDLLFND WKINLSSLVQ LRRKLELFTY VRFDSEYTII ATSS.QPDGA |
| | 751 800 |
| annotation | .....BBBEB BB........ ....HHBHH. ....BBFBBB .BB.BBBBG. |
| af499637-cva13 | GHALNQVYQI MYVPPGAPVP KKWDDYTWQT SSNPSIFYTY GSAPPRISIP |
| af546702-cva21 | GEVRNQVYQI MYIPPGAPRP SSWDDYTWQS SSNPSIFYMY GNAPPRMSIP |
| v01149-pv1m | GHALNQVYQI MYVPPGAPVP EKWDDYTWQT SSNPSIFYTY GTAPARISVP |
| d00239-01 | DDIGHVVMQY MYVPPGAPIP KTRNDFSWQS GTNMSIFWQH GQPFPRFSLP |
| pico-01 | DDIGHIVMQY MYVPPGAPIP SKRNDFSWQS GTNMSIFWQH GQPFPRFSLP |
| hrv-01 | DDIGHIVMQY MYVPPGAPIP SKRNDFSWQS GTNMSIFWQH GQPFPRFSLP |
| x02316-02 | QDIGHITMQY MYVPPGAPVP NSRDDYAWQS GTNASVFWQH GQAYPRFSLP |
| hrv-07 | NDIGHIVMQF MYVPPGAPVP IKREDYTWQS GTNASIFWQE GQPYPRFTIP |
| dq473503-07 | NGIGHIVMQF MYAPPGAPVP IKREDYTWQS GTNASIFWQE GQPYPRFTIP |
| hrv-08 | GDLGHIVLQY MYVPPGAPLP DKRMHDAWQT STNASVFWQV GQTYPRFTIP |
| pico-09 | ESVGHVVMQY MYVPPGAPLP RTRDDYAWQS GTNASIFWQH GQSYPRFSLP |
| hrv-09 | DSVGHVVMQY MYVPPGAPLP RTRDDYAWQS GTNASIFWQH GQSYPRFSLP |
| hrv-09-f01 | ESVGHVVMQY MYVPPGAPLP RTRDDYAWQS GTNASIFWQH GQSYPRFSLP |
| hrv-09-f02 | ESVGHVVMQY MYVPPGAPLP RTRDDYAWQS GTNASIFWQH GQSYPRFSLP |
| dq473498-10 | DDIGHIVMQY MYVPPGAPVP TKRDDFAWQS GTNASVFWQH GQPFPRFSLP |
| hrv-10 | DDIGHIVMQY MYVPPGAPVP TKRDDFAWQS GTNASVFWQH GQPFPRFSLP |
| ef173414-11 | NDIGHVVMQY MYVPPGAPVP EKRDDYTWQS GTNASIFWQY GQTYPRFSLP |
| ef173415-12 | GSNGHVVVQY MYVPPGAPLP KKRDDYTWQS GTNASVFWQE GQPYPRFTIP |
| hrv-13 | GDVGHVVMQY MYVPPGAPLP TKRNDYTWQS GTNASVFWQH GQIYPRFSLP |
| hrv-13-f03 | GDVGHVVMQY MYVPPGAPLP TKRNDYTWQS GTNASVFWQH GQIYPRFSLP |
| dq473493-15 | DNIGHVVMQY MYVPPGAPLP NKRNDYTWQS GTNASVFWQH GQPYPRFSLP |
| l24917-16 | GHIGHIVMQY MYVPPGAPIP TTRDDYAWQS GTNASVFWQH GQPFPRFSLP |
| hrv-18 | DDIGHIVMQY MYVPPGAPIP KTRDDFAWQS GTNASIFWQH GQTYPRFSLP |
| hrv-19 | KNIGHVVMQY MYVPPGAPIP KTRNDYTWQS GTNASIFWQH GQPYPRFSLP |
| hrv-20 | RDNGHVVLQY MYVPPGAPIP KTRDDYTWQS GTNASVFWQQ GQPYPRFTIP |
| hrv-21 | GDIGHVVMQY MYVPPGAPIP KTREDFAWQS GTNASIFWQH GQTYPRFSLP |
| hrv-22 | KNIGHVVMQY MYVPPGAPKP EKRDDYTWQS GTNASVFWQH GQPYPRFSLP |
| dq473497-23 | QDIGHITMQY MYVPPGAPIP KSRNDYAWQS GTNASIFWQH GQTYPRFSLP |
| hrv-24 | DDIGHVVMQY MYIPPGAPVP TKRDDYTWQS GTNASVFWQH GQTYPRFSLP |
| ef173416-24 | DDIGHVVMQY MYIPPGAPVP TKRDDYTWQS GTNASVFWQH GQTYPRFSLP |
| hrv-25 | ADIGHIVMQY MYVPPGAPLP TDRKHFAWQS STNASIFWQH GQPFPRFSLP |
| dq473508-28 | DDNGHVVMQY MYVPPGAPIP TTRNDYTWQS STNASVFWQQ GQPYPRFTIP |
| hrv-29 | NDIGHIVMQY MYVPPGAPVP NDRNHFAWQS GTNASIFWQH GQPFPRFSLP |
| dq473512-30 | QDIGHITMQY MYVPPGAPIP ESRNDYAWQS GTNASVFWQH GQTYPRFSLP |
| hrv-30 | QDIGHITMQY MYVPPGAPIP ESRNDYAWQS GTNASVFWQH GQTYPRFSLP |
| hrv-31 | SDIGHIVMQY MYVPPGAPVP TNRKHFAWQS GTNASIFWQH GQPFPRFTLP |
| hrv-32 | DSIGHVVMQY MYVPPGAPLP QARDDYTWQS GTNASIFWQH GQAYPRFSLP |
| hrv-33 | DDVGHVVMQY MYVPPGAPAP EKRDDYTWQS GTNASVFWQY GQTYPRFSLP |
| hrv-34 | DDIGHVVMQY MYVPPGAPIP KTRDDFAWQS GTNASIFWQH GQTYPRFSLP |
| dq473501-34 | DDIGHVVMQY MYVPPGAPIP KTRDDFAWQS GTNASIFWQH GQTYPRFSLP |
| dq473505-36 | DDSGHVVLQF MYVPPGAPVP VKRDDYTWQS GTNASVFWQE GQPYPRFTIP |
| hrv-38 | EGVGHVVMQY MYVPPGAPLP RKRDDYTWQS GTNASVFWQY GQTYPRFSLP |
| dq473495-38 | EGVGHVVMQY MYVPPGAPLP RKRDDYTWQS GTNASVFWQY GQTYPRFSLP |
| ay751783-39 | EDIGHIVMQY MYVPPGAPVP KKRDDYTWQS GTNASVFWQH GQPYPRFSLP |
| hrv-40 | EDIGHIVMQY MYVPPGAPIP KKRNDYTWQS GTNASVFWQH GQTFPRFSLP |
| dq473491-41 | SDVGHVVMQY MFVPPGAPLP EKRDDYTWQS GTNASVFWQY GQVYPRFSLP |
| hrv-43 | NDIGHVVMQY MYVPPGAPIP KTRKDYAWQS GTNASVFWQH GQTFPRFSLP |
| dq473499-44 | DDIGHIVMQY MYVLPGAPVP DDRNHFAWQS GTNASIFWQH GQPFPRFSLP |
| hrv-45 | GNLGHIVVQY MFVPPGAPLP VSRTDNTWQS STNASVFWQV GQTYPRFSIP |
| dq473506-46 | DDIGHVVIQY MYVPPGAPLP RYRNDYTWQS GTNASVFWQQ GQPYPRFTIP |
| hrv-47 | DDIGHIVMQY MYVPPGAPVP TSREHFAWQS GTNASIFWQQ GQPFPRFSLP |
| dq473496-49 | KDIGHITMQY MYVPPGAPVP KSRDDYAWQS GTNASVFWQH GQAYPRFSLP |
| hrv-49-f04 | EDIGHITMQY MYVPPGAPVP KSRDDYAWQS GTNASIFWQH GQAYPRFSLP |
| hrv-50 | VDIGHVVMQY MYVPPGAPIP KTRDDFAWQS GTNASIFWQH GQTYPRFSLP |
| hrv-51 | DDIGHIVLQY MYVPPGGPVP LTRKDDEWQS GTNASVFWQH GQPYPRFTIP |
| dq473507-53 | GNNGHVVIQY MYVPPGAPIP KTRDDYTWQS GTNASVFWQQ GQPYPRFTIP |
| hrv-54 | VDIGHIVMQF MYVPPGAPKP EKRNDYTWES STNPSIFWQH GQAYPRFSLP |
| hrv-54-f05 | ADIGHIVMQF MYVPPGAPKP EKRNDYTWES STNPSIFWQH GQAYPRFSLP |
| dq473511-55 | DDIGHVVMQY MYVPPGAPIP KTREDYAWQS GTNASIFWQH GQTYPRFSLP |
| hrv-56 | DDIGHIVMQY MYVPPGAPLP NSRDDFTWQS GTNASVFWQH GQAFPRFSLP |
| hrv-57 | EDVGHVVMQY MYVPPGAPIP KTRKDYAWQS GTNASIFWQH GQTYPRFSLP |
| hrv-58 | EDNGHIVLQF MYVPPGAPVP KNRDDFTWQS GTNASVFWQE GQPYPRFTIP |
| dq473500-59 | DDIGHIVMQY MYVPPGAPLP TKRDDYTWQS GTNASIFWQH GQTFPRFSLP |
| hrv-60 | DGIGHVVMQY MYVPPGAPLP TKRDDYTWQS GTNASVFWQH GQTYPRFSLP |
| hrv-61 | GDIGHVVMQY MYVPPGAPTP EKRNDFTWQS GTNASVFWQH GQAYPRFSLP |
| hrv-62 | ADIGHIVMQY MYVPPGAPLP TDRKHFAWQS STNASIFWQH GQPFPRFSLP |
| hrv-63 | DDIGHIVMQY MYVPPGAPLP TRREDYTWQS GTNASIFWQH GQAFPRFSLP |
| hrv-64 | ANIGHVVMQY MYVPPGAPIP TKRNDYVWQS GTNASIFWQH GQPYPRFSLP |
| ef173417-64 | ANIGHVVMQY MYVPPGAPIP TKRNDYVWQS GTNASIFWQH GQPYPRFSLP |
| hrv-65 | DDIGHIVLQY MYVPPGGPVP KTRKDEEWQT GTNASVFWQH GQPYPRFTIP |
| hrv-66 | DDIGHIVMQY MYVPPGAPIP DNRTHFAWQS GTNASIFWQL GQPFPRFSLP |
| hrv-67 | DSIGHVVMQY MYVPPGAPLP TKRDDYTWQS GTNASIFWQH GQSYPRFSLP |
| hrv-68 | KDNGHVVLQY MYVPPGAPIP KTRDDYTWQS GTNASVFWQQ GQPYPRFTIP |
| hrv-71 | DDLGHIALQY MYVPPGGPIP ETRDADEWQS GTNASVFWQH GQPYPRFTIP |
| dq473492-73 | GDVGHVVMQY MYVPPGAPLP TKRNDYTWQS GTNASVFWQH GQTYPRFSLP |
| dq473494-74 | DNIGHVVMQY MYVPPGAPLP KKRDDYTWQS GTNASVFWQH GQPYPRFSLP |
| dq473510-75 | NDIGHVVMQY MYVPPGAPIP TTRKDYAWQS GTNASVFWQH GQTFPRFSLP |
| dq473502-76 | DDIGHVVMQY MYVPPGAPVP KKRDDYTWQS GTNASIFWQY GQTYPRFSLP |
| hrv-76 | DDIGHVVMQY MYVPPGAPVP KKRDDYTWQS GTNASIFWQY GQTYPRFSLP |
| hrv-77 | DDIGHVVMQY MYVPPGAPIP DSRTHFAWQS GTNASIFWQH GQPFPRFSLP |
| hrv-78 | DNNGHVVLQF MFVPPGAPIP KKRDDYTWQS GTNASVFWQQ GQTYPRFSIP |
| ef173418-78 | DNNGHVVLQF MFVPPGAPIP KKRDDYTWQS GTNASVFWQQ GQTYPRFSIP |
| hrv-80 | EDIGHVVIQY MYVPPGAPLP NKRNDYTWQS GTNASVFWQQ GQPYPRFTIP |
| hrv-81 | GHIGHIVMQY MYVPPGAPIP TTREDYAWQS GTNASIFWQH GQPFPRFSLP |
| hrv-81-f06 | GHIGHIVMQY MYVPPGAPIP TTREDYAWQS GTNASIFWQH GQPFPRFSLP |
| hrv-81-f07 | GHIGHIVMQY MYVPPGAPIP TTREDYAWQS GTNASIFWQH GQPFPRFSLP |
| hrv-82 | NDIGHVVMQY MYVPPGAPKP EKRDDYTWQS GTNASIFWQH GQPYPRFSLP |
| dq473509-82 | NDIGHVVMQY MYVPPGAPKP EKRDDYTWQS GTNASIFWQH GQPYPRFSLP |
| hrv-85 | DDIGHIVMQY MYVPPGAPIP RKRDDYTWQS GTNASVFWQH GQTFPRFSLP |
| pico-85 | DDIGHIVMQY MYVPPGAPIP RKRDDYTWQS GTNASVFWQH GQTFPRFSLP |
| dq473504-88 | DDTGHIVLQF MYVPPGAPIP KKRDDYTWQS GTNASVFWQE GQPYPRFTIP |
| a10937-89 | NDSGHIVLQF MYVPPGAPVP EKRDDYTWQS GTNASVFWQE GQPYPRFTIP |
| hrv-89 | XDSGHIVLQF MYVPPGAPVP EKRDDYTWQS GTNASVFWQE GQPYPRFTIP |
| hrv-89-f08 | DDNGHIVLQF MYVPPGAPVP EKRDDYTWQS GTNASVFWQE GQPYPRFTIP |
| hrv-89-f09 | DDNGHIVLQF MYVPPGAPVP EKRDDYTWQS GTNASVFWQE GQPYPRFTIP |
| m16248-89 | NDSGHIVLQF MYVPPGAPVP EKRDDYTWQS GTNASVFWQE GQPYPRFTIP |
| hrv-90 | NDIGHVVMQY MYIPPGAPVP EKRDDYAWQS GTNASIFWQH GQTYPRFSLP |
| hrv-94 | ANIGHVVMQY MYVPPGAPKP DKRDDYVWQS GTNASIFWQH GQPYPRFSLP |
| ef173419-94 | ANIGHVVMQY MYVPPGAPKP DKRDDYVWQS GTNASIFWQH GQPYPRFSLP |
| hrv-95 | GDLGHIVLQY MYVPPGAPLP DKRMHDAWQT STNASVFWQV GQTYPRFTIP |
| hrv-96 | GDIGHVVMQY MYVPPGAPTP EKRDDFTWQS GTNASVFWQH GQAYPRFSLP |
| hrv-98 | ADIGHIVMQF MYVPPGAPKP KKRNDYTWES STNPSIFWQH GQAYPRFSLP |
| hrv-100 | DDIGHIVMQY MYVPPGAPVP TKRDDFAWQS GTNASVFWQH GQPFPRISLP |
| ef186077-qpm | ......LMQI MFVPPGITPP GGKDGREWDT ASNPSVFFQP NSGFPRFTIP |
| ef077279-nat001 | ......LMQV MFVPPGIDVP KQKEGKEWNA ASNPSVFFQP HSGFPRFTIP |
| ny1078 | ......LMQI MYVPPGARAP ANKDSKEWDS ASNPSVFYQP HSGFPRFTIP |
| ef582385-c024 | ......LVQI MFVPPGIDAP DSIDSRLWDS ASNPSVFYQP KSGFPRFTIP |
| ef077280-nat045 | ......LMQI MYVPPGIEAP ESLNDKRWNG ASNPSVFYQP KSGFPRFTIP |
| ef582387-c026 | ......LMQI MFIPPGIPAP NGKNSREWDT ASNPSVFFQP NSGFPRFTIP |
| ef582386-c025 | ......LMQI MYVPPGAKPP NNNSSMEWNT ASNPSIFFQP GNGFPRFTIP |
| dq473485-03 | SYSSNLTVQA MYVPPGAPNP KEWDDYTWQS ASNPSVFFKV GET.SRFSVP |
| ef173422-03 | SYSSNLTVQA MYVPPGAPNP KEWDDYTWQS ASNPSVFFKV GET.SRFSVP |
| dq473490-04 | SYSSNLTVQA MFIPPGAPNP IKWDDYTWQS ATNPSVFFNV GKS.ARFSVP |
| hrv-05 | KFSSNLTIQA MFIPPGAPNP KKWDDYTWQS ATNPSVFFNV GKS.ARFSVP |
| dq473486-06 | NYASNLVVQA MYVPPGAPNP EKWDDFTWQS ASNPSVFFKV GDT.SRFSVP |
| l05355-14 | NYSSNLVVQA MYVPPGAPNP KEWDDYTWQS ASNPSVFFKV GDT.SRFSVP |
| k02121-14 | NYSSNLVVQA MYVPHGAPKS KRVGDYTWQS ASNPSVFFKV GDT.SRFSVP |
| ef173420-17 | KYASNLTVQA MYVPPGAPNP VKWNDYTWQS ASNPSVFFEV GKM.ARFSVP |
| hrv-26 | KYSSNLTVQA MYIPPGAPNP VKWDDYTWQS ATNPSVFFNV GKS.ARFSVP |
| hrv-27 | RFSNTLTVQA MFIPPGAPNP VEWDDYTWQS ASNPSVFFNV GKS.ARFSVP |
| ef173421-27 | RFSNTLTVQA MFIPPGAPNP VEWDDYTWQS ASNPSVFFNV GKS.ARFSVP |
| dq473487-35 | KYSSNLTVQA MYVPPGAPNP EAWNDYTWQS ASNPSVFFKV GDT.SRFSVP |
| hrv-35 | KYSSNLTVQA MYVPPGAPNP EAWNDYTWQS ASNPSVFFKV GDT.SRFSVP |
| ef173423-37 | NYASNLVVQA MYVPPGAPNP KEWNDFTWQS ASNPSVFFKV GDT.ARFSVP |
| hrv-42 | KFSSNLTVQA MFIPPGAPNP SKWDDYTWQS ATNPSVFFNV GKS.ARFSVP |
| dq473488-48 | QYASNLIVQA MYVPPGAPNP IEWNDYTWQS ASNPSVFFEV GKT.ARFSVP |
| hrv-52 | QYASNLTVQA MYVPPGAPNP VEWNDYTWQS ASNPSVFFEV GKT.ARFSVP |
| hrv-52-f10 | EYASNLTVQA MYVPPGAPNP VKWNDYTWQS ASNPSVFFEV GKT.ARFSVP |
| ef173424-52 | QYASNLTVQA MYVPPGAPNP VEWNDYTWQS ASNPSVFFEV GKT.ARFSVP |
| hrv-69 | EYASNLTVQA MYVPPGAPNP VKWNDYTWQS ASNPSVFFEV GKT.ARFSVP |
| dq473489-70 | QYASNLTVQA MYVPPGAPNP IKWDDYTWQS ASNPSVFFEV GKM.ARFSVP |
| hrv-72 | NYSSNLVVQA MYVPPGAPNP VEWDDYTWQS ASNPSVFFKV GDT.SRFSVP |
| hrv-79 | QYSSNLTVQA MYVPPGAPNP TKWDDYTWQS ASNPSVFFKV GDT.ARFSVP |
| hrv-83 | SYSSDLTVQA MYVPPGAPNP TKWDDYTWQS ASNPSVFFKV GDT.ARFSVP |
| hrv-84 | QYSNTLTIQA MFIPPGAPNP KEWDDYTWQS ASNPSVFFNV GNS.ARFSVP |
| hrv-86 | SYSSNLTVQA MYVPPGAPNP KTWNDYTWQS ASNPSVFFKV GDT.ARFSVP |
| hrv-91 | QYASNLTVQA MYVPPGAPNP IKWDDYTWQS ASNPSVFFEV GKM.ARFSVP |
| hrv-92 | KYSSSLTVQA MYVPPGAPNP TKWDDYTWQS ASNPSVFFKV GDT.ARFSVP |
| ef173425-93 | QFSNTLTVQA MFIPPGAPNP QEWDDYTWQS ASNPSVFFNV GKS.ARFSVP |
| hrv-97 | QFSNTLTVQA MFIPPGAPNP IQWDDYTWQS ASNPSVFFNV GRS.ARFSVP |
| hrv-99 | KYSSNLTIQA MFIPPGAPNP IKWDDYTWQS ATNPSVFFNV GKT.ARFSVP |
| | 801 850 |
| annotation | .......BBB BLLLLLL... .....LLLLL LLLLLHHHHL .BBHBBB... |
| af499637-cva13 | FVGIANAYSH FYDGYATVPL KTDTTDSGAA YYGAVSINDF GLLAVRVVNE |
| af546702-cva21 | YVGIANAYSH FYDGFARVPL EGENTDAGDT FYGLVSINDF GVLAVRAVNR |
| v01149-pv1m | YVGISNAYSH FYDGFSKVPL KDQSAALGDS LYGAASLNDF GILAVRVVND |
| d00239-01 | FLSIASAYYM FYDGYDG... .....DNSSS KYGSIVTNDM GTICSRIVTE |
| pico-01 | FLSIASAYYM FYDGYDG... .....DNTSS KYGSVVTNDM GTICSRIVTE |
| hrv-01 | FLSIASAYYM FYDGYDG... .....DNTSS KYGSVVTNDM GTICSRIVTE |
| x02316-02 | FLSVASAYYM FYDGYD.... .....EQDQ. NYGTANTNNM GSLCSRIVTE |
| hrv-07 | FMSIASAYYM FYDGYDG... .....DDASS KYGSVVTNDM GTICVRLVTS |
| dq473503-07 | FMSIASAYYM FYDGYDG... .....DDASS KYGSVVTNDM GTICVRLVTS |
| hrv-08 | FSSIASAYYM FYDGYDS... .....DGLDA IYGIPVTNHM GTICVRMVTD |
| pico-09 | FLSIASAYYM FYDGYDG... ......GPDS QYGTIVTNDM GSLCSRIVTE |
| hrv-09 | FLSIASAYYM FYDGYDG... ......GPDS LYGTIVTNDM GSLCSRVVTE |
| hrv-09-f01 | FLSIASAYYM FYDGYDG... ......GPDS QYGTIVTNDM GSLCSRIVTE |
| hrv-09-f02 | FLSIASAYYM FYDGYDG... ......GPDS QYGTIVTNDM GSLCSRIVTE |
| dq473498-10 | FLSIASAYYM FYDGYDG... .....DTHDS RYGTTVINHM GTLCMRIVTN |
| hrv-10 | FLSIASAYYM FYDGYDG... .....DTHDS RYGTTVINHM GTLCMRIVTN |
| ef173414-11 | FMSIASAYYM FYDGYDG... .....DQPNS RYGNIVTNDM GTLCYRIVTD |
| ef173415-12 | FISIASAYYM FYDGYAD... .....DNPSA PYGTVVTNDM GSLCVRIVTD |
| hrv-13 | FLSIASAYYM FYDGYNG... .....DSSDA RYGTTITNDM GTLCFRIVTE |
| hrv-13-f03 | FLSIASAYYM FYDGYNG... .....DSTDA RYGTTVTNDM GTLCFRIVTE |
| dq473493-15 | FLSIASAYYM FYDGYDG... .....DSTES HYGTVVTNDM GTLCSRIVTE |
| l24917-16 | FLSIASAYYM FYDGYDG... .....DTYKS RYGTVVTNDM GTLCSRIVTS |
| hrv-18 | FLSIASAYYM FYDGYDG... .....DQTSS RYGTVATNDM GTLCSRIVTD |
| hrv-19 | FLSIASAYYM FYDGYDG... .....DSPGS RYGTIVTNDM GTLCSRIVTD |
| hrv-20 | FMSIASAYYM FYDGYE.... .....DDKGS VYGSVVTNDM GTLCVRIVTE |
| hrv-21 | FLSIASAYYM FYDGYDG... .....DQTDS QYGAVVTNDM GSLCYRIVTG |
| hrv-22 | FLSVASAYYX FYDGYDG... ......GPGS RYGAVVTNDM GTLCSRIVTE |
| dq473497-23 | FLSVASAYYM FYDGYN.... ......EKGT HYGTVSTNNM GTLCSRVVTE |
| hrv-24 | FLSVASAYYM FYDGYDG... .....DQHDS VYGSVVTNDM GTLCYRIVTD |
| ef173416-24 | FLSVASAYYM FYDGYDG... .....DQHDS VYGSVVTNDM GTLCYRIVTD |
| hrv-25 | FLSVASAYYM FYDGYNG... .....DDHTA RYGTTVVNRM GALCMRIVTN |
| dq473508-28 | FMSIASAYYM FYDGYE.... .....DDNGT TYGAVVTNHM GTLCARIVTE |
| hrv-29 | FLSVASAYYM FYDGYNG... .....GDHTA TYGTTVVNRM GTLCVRIVTG |
| dq473512-30 | FLSVASAYYM FYDGYN.... ......EGGT NYGTVSTNNM GTLCSRVVTE |
| hrv-30 | FLSVASAYYM FYDGYN.... ......EGGT NYGTVSTNNM GTLCSRVVTE |
| hrv-31 | FLSVASAYYM FYDGYDG... .....DKSGA KYGTTVVNRM GALCMRVVTN |
| hrv-32 | FLSIASAYYM FYDGYDG... ......GPDS QYGTIVTNDM GSLCSRIVTE |
| hrv-33 | FLSIASAYYM FYDGYDG... .....DQPNS RYGNMVTNDM GTLCSRIVTD |
| hrv-34 | FLSIASAYYM FYDGYDG... .....DQHDS RYGTVVTNDM GTLCSRIVTD |
| dq473501-34 | FLSIASAYYM FYDGYDG... .....DQHDS RYGTVVTNDM GTLCSRIVTD |
| dq473505-36 | FMSIASAYYM FYDGYDG... .....DNAAS KYGSVVTNDM GTICVRIVTS |
| hrv-38 | FLSIASVYYM FYDGYDG... .....DSTES HYGTAVTNDM GTLCSRIVTE |
| dq473495-38 | FLSIASAYYM FYDGYDG... .....DSTES HYGTAVTNDM GTLCSRIVTE |
| ay751783-39 | FLSIASAYYM FYDGYDG... .....DKSSS RYGVSVTNDM GTLCTRIVTN |
| hrv-40 | FLSIASAYYM FYDGYDG... .....DTSTS RYGTSVTNHM GTLCSRIVTN |
| dq473491-41 | FLSIASAYYM FYDGYEE... .....GSTNA RYGTTVTNDM GTLCFRIVTE |
| hrv-43 | FLSIASAYYM FYDGYEG... .....DQKTS RYGTIASNHM GTLCSRIVTE |
| dq473499-44 | FLSVASAYYM FYDGYNG... .....GDHTA TYGTTVVNRM GTLCVRIVTG |
| hrv-45 | FSSIASAYYM FYDGYDT... .....DGTDA VYGVSVTNDM GTICVRIVTD |
| dq473506-46 | FMSIASAYYM FYDGYES... .....DK.GK IYGTAVTNDM GTICVRIVTE |
| hrv-47 | FLSVASAYYM FYDGYNG... .....DRSGA KYGTTVVNRM GALCMRVVTN |
| dq473496-49 | FLSVASAYYM FYDGYN.... .....EQ.GQ NYGTVSTNNM GSLCSRIVTE |
| hrv-49-f04 | FLSVASAYYM FYDGYN.... ......EEGQ NYGTVSTNNM GSLCSRIVTE |
| hrv-50 | FLSIASAYYM FYDGYDG... .....DKSTS RYGTVVTNDM GTLCSRIVTD |
| hrv-51 | FVSIASAYYM FYDGYEG... .....DSLTS QYGSVVTNAM GTLCVRVVTE |
| dq473507-53 | FMSIASAYYM FYDGYE.... .....DDNGT TYGAVVTNDM GTLCVRIVTE |
| hrv-54 | FLSIASAYYM FYDGYDG... .....DAPGS RYGTSVTNHM GTLCSRVVTG |
| hrv-54-f05 | FLSIASAYYM FYDGYDG... .....DAPGS RYGTSVTNHM GTLCSRVVTG |
| dq473511-55 | FLSIASAYYM FYDGYDG... .....DQTES RYGTAVTNDM GTLCSRIITD |
| hrv-56 | FLSIASAYYM FYDGYDG... .....DTSSS RYGTSVTNHM GTLCSRIVTN |
| hrv-57 | FLSIASAYYM FYDGYDG... .....DQTES RYGTVVTNDM GTLCSRIVTD |
| hrv-58 | FMSIASAYYM FYDGYDG... .....DDAKS IYGSVVTNDM GTICVRIVTS |
| dq473500-59 | FLSIASAYYM FYDGYDG... .....DKSES RYGVSVTNHM GTLCSRIVTN |
| hrv-60 | FLSIASAYYM FYDGYDG... .....HSTES HYGTVVTNDM GTLCSRIVTE |
| hrv-61 | FLSIASAYYM FYDGYDG... .....DSEIT RYGTSVTNDM GALCFRIVTE |
| hrv-62 | FLSVASAYYM FYDGYNG... .....DDYTA KYGTTVVNRM GALCMRIVTN |
| hrv-63 | FLSIASAYYM FYDGYDG... .....DKSSS RYGVSVTNHM GTLCSRIVTN |
| hrv-64 | FLSIASAYYM FYDGYDG... ......GPGS RYGXXVTNDM GTLCSRIVTE |
| ef173417-64 | FLSIASAYYM FYDGYDG... ......GPGS RYGTAVTNDM GTLCSRIVTE |
| hrv-65 | FVSIASAYYM FYDGYEG... .....DDPNS KYGSVVTNAM GTLYVRVVTE |
| hrv-66 | FLGIASAYYM FYDGYDG... .....DTPGS RYGTTVVNHM GTLCIRIVTN |
| hrv-67 | FLSIASAYYM FYDGYDG... ......GPDS LYGTIVTNDM GSLCSRIVTE |
| hrv-68 | FMSIASAYYM FYDGYE.... .....DDKGS VYGSVVTNDM GTLCVRIVTE |
| hrv-71 | FMSIASAYYM FYDGYEG... .....DALSS KYGSVVTNAM GTLCVRVVTE |
| dq473492-73 | FLSIASAYYM FYDGYDG... .....DSAQS HYGTTVVNDM GTLCFRIVTE |
| dq473494-74 | FLSIASAYYM FYDGYDG... .....DSTES HYGTVVTNDM GTLCSRIVTE |
| dq473510-75 | FLSIASAYYM FYDGYEG... .....DQNTS RYGTIASNHM GTLCSRIVTE |
| dq473502-76 | FLSIASAYYM FYDGYDG... .....DQPSS RYGNIVTNDM GTLCSRIVTD |
| hrv-76 | FLSIASAYYM FYDGYDG... .....DQPSS RYGNIVTNDM GTLCSRIVTD |
| hrv-77 | FLSIASAYYM FYDGYDG... .....DTYES RYGTTVVNHM GTLCIRIVTN |
| hrv-78 | FSSIASAYYM FYDGYPD... .....DSTSS PYGTVVTNDM GTLCMRMVTD |
| ef173418-78 | FSSIASAYYM FYDGYSD... .....DSTSS PYGTVVTNDM GTLCMRMVTD |
| hrv-80 | FMSIASAYYM FYDGYES... .....DKGN. IYGTAVTNDM GTLCARIVTE |
| hrv-81 | FLSVASAYYM FYDGYDG... .....DTYHS RYGTVVTXDM GTLCSRIVTS |
| hrv-81-f06 | FLSVASAYYM FYDGYDG... .....DTYQS RYGTVVTNDM GTLCSRIVTS |
| hrv-81-f07 | FLSVASAYYM FYDGYDG... .....DTYQS RYGTVVTNDM GTLCSRIVTS |
| hrv-82 | FLSIASAYYM FYDGYDG... .....DAPGS RYGTIVTNDM GTLCSRIVTE |
| dq473509-82 | FLSIASAYYM FYDGYDG... .....DVPGS RYGTIVTNDM GTLCSRIVTE |
| hrv-85 | FLSVASAYYM FYDGYDG... .....DTPGS MYGTSVTNHM GTLCSRIVTN |
| pico-85 | FLSVASAYYM FYDGYDG... .....DTPGS MYGTSVTNHM GTLCSRIVTN |
| dq473504-88 | FMSIASAYYM FYDGYDG... .....DDASS RYGSVVTNDM GTICIRLVTS |
| a10937-89 | FMSIASAYYM FYDGYDG... .....DSAAS KYGSVVTNDM GTICVRIVTS |
| hrv-89 | FMSIASAYYM FYDGYDG... .....DSAAS KYGSVVTNDM GTICVRIVTS |
| hrv-89-f08 | FMSIASAYYM FYDGYDG... .....DSAAS KYGSVVTNDM GTICVRMVTS |
| hrv-89-f09 | FMSIASAYYM FYDGYDG... .....DNAAS KYGSVVTNDM GTICVRMVTS |
| m16248-89 | FMSIASAYYM FYDGYDG... .....DSAAS KYGSVVTNDM GTICVRIVTS |
| hrv-90 | FLSIASAYYM FYDGYDG... .....DQTDS RYGTIVTNDM GTLCYRIVTD |
| hrv-94 | FLSIASAYYM FYDGYDG... ......GPGS RYGTVVTNDM GTLCSRIVTE |
| ef173419-94 | FLSIASAYYM FYDGYDG... ......GPGS RYGTVVTNDM GTLCSRIVTE |
| hrv-95 | FSSIASAYYM FYDGYDS... .....DGLDA IYGIPVTNHM GTICVRMVTD |
| hrv-96 | FLSIASAYYM FYDGYDG... .....DSEST RYGTSVTNDM GTLCFRIVTE |
| hrv-98 | FLSIASAYYM FYDGYDG... .....DAPGS RYGTSVTNHM GTLCSRVVTG |
| hrv-100 | FLSIASAYYM FYDGYDG... .....DTHDS HYGTTVINHM GTLCMRIVTN |
| ef186077-qpm | FTGLGSAYYM FYDGYDG... ....TDDANI NYGISLTNDM GTLCFRALDG |
| ef077279-nat001 | FTGLGSAYYM FYDGYDG... ....INADNT NYGISETNDM GTLCFRALDG |
| ny1078 | FTGLGSAYYM FYDGYDG... ....TEAGNI QYGISRTNDM GSLCIRALDD |
| ef582385-c024 | FTGLGSAYYM FYDGYDVP.. ....RNKSNA VYGITSTNDM GTLCFRAMED |
| ef077280-nat045 | FTGLGSAYYV FYDGYDE... ....NKVGST TYGISATNDM GTLCFRALED |
| ef582387-c026 | FTGLGSAYYM FYDGYDG... ....TDAANT NYGISLTNDM GTLCFRALDG |
| ef582386-c025 | FTGLGSAYYM FYDGYDK... ....VSHDEG TYGTSVTNDM GRLCFRTPNN |
| dq473485-03 | FVGIASAYNC FYDGYSH... .....DDPDT PYGITVLNHM GSMAFRVVNE |
| ef173422-03 | FVGIASAYNC FYDGYSH... .....DDPDT PYGITVLNHM GSMAFRVVNE |
| dq473490-04 | YLGIASAYNC FYDGYSH... .....DNKTT PYGINVLNHM GSIAFRVVNE |
| hrv-05 | YLGIASAYNC FYDGYSH... .....DNSTT PYGINVLNHM GSMAFRVVNE |
| dq473486-06 | FVGLASAYNC FYDGYSH... .....DNKDT PYGITVLNHM GSIAFRVVNE |
| l05355-14 | YVGLASAYNC FYDGYSH... .....DDAET QYGITVLNHM GSMAFRIVNE |
| k02121-14 | YVGLASAYNC FYDGYSH... .....DDAET QYGITVLNHM GSMAFRIVNE |
| ef173420-17 | FIGIASAYSC FYDGYSH... .....DDENT PYGINVLNHM GSIAFRIVND |
| hrv-26 | YLGIASAYNC FYDGYSH... .....DDTKT PYGINVLNHM GSMAFRVVNE |
| hrv-27 | YLGIASAYNN FYDGYSH... .....DSKTT VYGINVLNHM GSIAFRIVNE |
| ef173421-27 | YLGIASAYNN FYDGYSH... .....DSKTT VYGINVLNHM GSIAFRIVNE |
| dq473487-35 | FVGLASAYNC FYDGYSH... .....DDENT PYGITVLNHM GSMAFRIVND |
| hrv-35 | FVGLASAYNC FYDGYSH... .....DDENT PYGITVLNHM GSMAFRIVND |
| ef173423-37 | FVGLASAYNC FYDGYSH... .....DDENT PYGITVLNHM GSMAFRVVDE |
| hrv-42 | YLGIASAYNC FYDGYSH... .....DNLTT PYGINVLNHM GSMAFRVVNE |
| dq473488-48 | FTGIASAYNC FYDGYSH... .....DDENT QYGINVLNHM GSIAFRVVND |
| hrv-52 | FVGIASAYNC FYDGYSH... .....DDANT QYGINVLNHM GSIAFRVVND |
| hrv-52-f10 | FIGIASAYNC FYDGYSH... .....DDPET QYGINVLNHM GSIAFRVVND |
| ef173424-52 | FVGIASAYNC FYDGYSH... .....DDANT QYGINVLNHM GSIAFRVVND |
| hrv-69 | FTGIASAYNC FYDGYSH... .....DNEDT QYGINVLNHM GSIAFRVVND |
| dq473489-70 | FVGIASAYNC FYDGYSH... .....DNEDT PYGISVLNHM GSIAFRIVND |
| hrv-72 | YVGLASAYNC FYDGYSH... .....DDAET QYGISVLNHM GSMAFRIVNE |
| hrv-79 | FVGLASAYNC FYDGYSH... .....DDENT PYGITVLNHM GSMAFRVVND |
| hrv-83 | FVGLASAYNC FYDGYSH... .....DDEDT PYGITVLNHM GSMAFRVVNE |
| hrv-84 | YLGIASAYNN FYDGYSH... .....DSRTT VYGINVLNHM GVMAFRVVNE |
| hrv-86 | FVGLASAYSC FYDGYSH... .....DNEDT PYGITVLNHM GSIAFRVVND |
| hrv-91 | FIGIASAYNC FYDGYSH... .....DNEDT PYGINVLNHM GSIAFRIVND |
| hrv-92 | FVGLASAYNC FYDGYSH... .....DDEDT PYGITVLNHM GSMAFRIVNE |
| ef173425-93 | YLGIASAYNN FYDGYSH... .....DDKTT VYGINVLNHM GSIAFRVVNE |
| hrv-97 | YLGIASAYNN FYDGYSH... .....DNKDT VYGINVLNHM GSIAFRVVNE |
| hrv-99 | YLGIASAYXC FYDGYSH... .....DDPNT PYGINVLNHM GSIAFRVVNE |
| | 851 900 |
| annotation | .....BBBBB BBBBIBB..B BBB....... .......... .......... |
| af499637-cva13 | HNPVRVSSKI RVYMKPKHVR VWCPRPPRAV EYYGPGV... ...DYKANTL |
| af546702-cva21 | SNPHTIHTSV RVYMKPKHIR CWCPRPPRAV LYRGEGV... ...DMISSAI |
| v01149-pv1m | HNPTKVTSKI RVYLKPKHIR VWCPRPPRAV AYYGPGV... ...DYKDGTL |
| d00239-01 | KQEHPVVITT HIYHKAKHTK AWCPRPPRAV PYTHSRVTNY VPKTGDVT.. |
| pico-01 | KQKHSVVITT HIYHKAKHTK AWCPRPPRAV PYTHSHVTNY MPETGDVT.. |
| hrv-01 | KQKHSVVITT HIYHKAKHTK AWCPRPPRAV PYTHSHVTNY MPETGDVT.. |
| x02316-02 | KHIHKVHIMT RIYHKAKHVK AWCPRPPRAL EYTRAHRTNF KIEDRSIQ.. |
| hrv-07 | TQKHNLKIVS RIYHKAKHIK AWCPRPPRAV PYQHTHSTNY VPQNGEVATQ |
| dq473503-07 | TQKHNLKIVS RIYHKAKHIK AWCPRPPRAV PYQHTHSTNY VPQNGEVATQ |
| hrv-08 | KQKIKTKIDS RIYLKAKHIK AWCPRPPRAV TYNHIYNPNY VREGVTPE.. |
| pico-09 | EHGSRVKIST RIYHKAKHVK AWCPRPPRAV EYIHTHVTNY KPSTGDYATV |
| hrv-09 | EHGPRVKIST RIYHKAKHVK AWCPRPPRAV EYIHTHVTNY KPSTGDYATV |
| hrv-09-f01 | EHGSRVKIST RIYHKAKHVK AWCPRPPRAV EYIHTHVTNY KPSEGEYSTV |
| hrv-09-f02 | EHGSRVKIST RIYHKAKHVK AWCPRPPRAV EYIHTHVTNY KPSEGEYSTV |
| dq473498-10 | QQAHEVEITT SVYHKAKHVK AWCPRPPRAV PYTHAHSTNY KPHGKELQI. |
| hrv-10 | QQAHEVEITT SVYHKAKHVK AWCPRPPRAV PYTHAHSTNY KPHGKELQI. |
| ef173414-11 | DHRHKIEVTT RVYHKAKHVK VWCPRPPRAV EYTHTHVTNY KPQEGQVK.. |
| ef173415-12 | QQKHKVKITS RIYHKAKHIS AWGPRPPRAV PYQHIHNPNY KTSNGVPD.. |
| hrv-13 | EHTNKVKVTT RIYHKAKHVK AWCPRPPRAV EYTNVHVTNY KPGTGDVAVS |
| hrv-13-f03 | EHTNKVKVTT RIYHKAKHIK AWCPRPPRAV EYTNVHVTNY KPKTGDVAVS |
| dq473493-15 | EHGTRVEITT RVYHKAKHVK AWCPRPPRAV EYTHTHVTNY KPQDGDVTTV |
| l24917-16 | EQLHKVKVVT RIYHKAKHTK AWCPRPPRAV QYSHTHTTNY KLSSEVHND. |
| hrv-18 | KHKNEVEITT RIYHKAKHVK AWCPRPPRAV EYTHTHVTNY KPKEGREK.. |
| hrv-19 | EHQTQVAITT RVYHKAKHIK AWCPRPPRAV EYTHTHVTNY KPQTGEVTLP |
| hrv-20 | QQTHKVKITS RIFHKAKHIS AWCPRAPRAV PYQHTKSTNL VPRTGEITTH |
| hrv-21 | QHKHKIEVTT RIYHKAKHVK AWCPRPPRAV EYTHTHVTNY KIANHEVT.. |
| hrv-22 | EHQTQVKITT RVYHKAKHVK AWCPRPPRAV GYTHTHVTNY KPSVGDYTLP |
| dq473497-23 | KHIHDMRIMT RVYHKAKHVK AWCPRPPRAL EYTRAHRTNF KIEGENVK.. |
| hrv-24 | KHNHQIEITT RIYHKAKHIK VWCPRPPRAV EYTHTHVTNY KHQTREVK.. |
| ef173416-24 | KHNHQIEITT RIYHKAKHIK VWCPRPPRAV EYTHTHVTNY KHQTREVK.. |
| hrv-25 | KQVHDVEVTT NIYHKAKHVK AWCPRPPRAV PYKYVDFNNY AASDNVDI.. |
| dq473508-28 | QQKHEVKITS IIFHKAKHVS AWCPRPPRAV AYQHTYSPNF VPQEGDVETH |
| hrv-29 | KQAHDVQVTT SIYHKAKHVK AWCPRPPRVV PYKYVGLTNY TLKEEDTV.. |
| dq473512-30 | KHIHDVRIMT RVYHKAKHVK AWCPRPPRAL EYTRAHRTNF KIDGREVK.. |
| hrv-30 | KHIHDVRIMT RVYHKAKHVK AWCPRPPRAL EYTRAHRTNF KIDGREVK.. |
| hrv-31 | KQAHKVEITT NIYHKAKHVK AWCPRPPRAV PYRYVGSTNY KPDENEVTI. |
| hrv-32 | EHGSRVDIST RVYHKAKHVK AWCPRPPRAV EYTHTHVTNY KPSTGDYTTA |
| hrv-33 | NHKHPIEVTT RVYHKAKHVK VWCPRPPRAV EYTHTHVTNY KSTTREVK.. |
| hrv-34 | EHQNRVEITT RVYHKAKHVK TWCPRPPRAV EYTHTHVTNY KVRGKTEK.. |
| dq473501-34 | EHQNRVEITT RVYHKAKHVK TWCPRPPRAV EYTHTHVTNY KVRGKTEK.. |
| dq473505-36 | NQKHDLNIVC RIYHKAKHIK AWCPRPPRAV PYQHTHSTNY IPYKGEIT.. |
| hrv-38 | NHGTQVKITT RIYHKAKHVK AWCPRPPRAV EYRHTHVNNY KPDQGEVTTM |
| dq473495-38 | NHGTQVKITT RIYHKAKHVK AWCPRPPRAV EYRHTHVNNY KPDQGEVTTM |
| ay751783-39 | QQKHLVEVTT RVYHKAKHVK AWCPRAPRAV PYTHSNVTNY KVRDGEPT.. |
| hrv-40 | KQQHEVEITT RIYHKAKHIK AWCPRAPRAV PYTHTHSTNY KPQEGEVQ.. |
| dq473491-41 | EHTNKVKVTT RVYHKAKHVK AWCPRPPRAV EYTNVHVTNY KPKAGAEIVA |
| hrv-43 | EHQNQIEITT RIYHKAKHIK AWCPRPPRAV EYTHTHVTNY KREGKEVET. |
| dq473499-44 | KQAHDVQVTT SIYHKAKHVK AWCPRPPRVV PYKYVGLTNY TLKETDTV.. |
| hrv-45 | QQQHRVKIDS MVYLKAKHIK AWCPRPPRAV TYNHTYNPNY VRADETAT.. |
| dq473506-46 | QQKHKVLITS RIYHKAKHIK AWCPRAPRAV PYQHIYNPNF KTTQPETIPD |
| hrv-47 | KQLHKVEITT NIYHKAKHVK AWCPRPPRAV PYRYVGSTNY KPDQGEVAI. |
| dq473496-49 | KHIHSMHIMT RIYHKAKHVK AWCPRPPRAL EYTRAHRTNF KVEDRDIK.. |
| hrv-49-f04 | KHIHNMHIMT RIYHKAKHVK AWCPRPPRAL EYTRAHRTNF KIQNRDIK.. |
| hrv-50 | EHQNKVEITT RVYHKAKHIK VWCPRPPRAV EYTHTHVTNY KKSDATEK.. |
| hrv-51 | QQKHEVNITS RIYHKAKHVS AWCPRPPRAV AYQHTYSTNF VPKEGFEGL. |
| dq473507-53 | QQKNEVKITS RIYHKAKHIS AWCPRPPRAV AYQHTYSPNF VPQTGTVETH |
| hrv-54 | KQKHPVEITT RVYHKAKHIR AWCPRAPRAV PYTHTRSTNY MPREGDPT.. |
| hrv-54-f05 | KQEHPVEITT RVYHKAKHIR AWCPRAPRAV PYTHTRSTNY MPQDGEPT.. |
| dq473511-55 | NHKHPIEVTT RVYHKAKHIK AWCPRPPRAV EYTHTHVTNY KKTDGTEK.. |
| hrv-56 | KQLHPVEVTT RVYHKAKHIR AWCPRAPRAV PYTHAHVTNY KPQDGDVQ.. |
| hrv-57 | QHTHHVKVTT RVYHKAKHVK AWCPRPPRAI EYTHTHVTNY KVKGKQEETA |
| hrv-58 | KQRHNLNIVC RIYHKAKHIK AWCPRPPRAV PYQFTHSTNY IPDSGEVTTQ |
| dq473500-59 | SQEHPVEVVT RVYHKAKHVK AWCPRAPRAV PYTHSYVTNY KIAGKEPE.. |
| hrv-60 | HHGTQVHVAT RIYHKAKHVK AWCPRPPRAV EYRHTHVNNY RPDDGEAAIT |
| hrv-61 | QHTNQVKITT RIYHKAKHVK VWCPRPPRAV EYTNVHLTNY KPKDSEKQVT |
| hrv-62 | KQVHDVEVTT NIYHKAKHVK AWCPRPPRAV PYKYVDFNNY AASDSVDI.. |
| hrv-63 | SQEHPVEVTT RVYHKAKHIR AWCPRAPRAV PYTHSYVTNY KITGQETE.. |
| hrv-64 | EHTTQVNITT RVYHKAKHVK AWCPRPPRAV GYTHTNVTNY KPSKGEYTPP |
| ef173417-64 | EHTTQVNITT RVYHKAKHVK AWCPRPPRAV GYTHTNVTNY KPSKGEYTPP |
| hrv-65 | RQKHEVNITS RIYHKAKHIS AWCPRPPRAV AYQHTYSTNF VPSGGLTNLR |
| hrv-66 | EQHHNVEITT RVYHKAKHVK AWCPRPLRAV PYTTVNSTNY MPHTGDLQI. |
| hrv-67 | EHGSRVKIAT RVYHKAKHVK AWCPRPPRAV EYIHTHVTNY RPETGEAQTV |
| hrv-68 | QQTHRVKITS RIFHKAKHIS AWCPRAPRAV PYQHTRSTNL VPKEGDIKTH |
| hrv-71 | QQSNTVNITS RIYHKAKHVR AWCPRPPRAV AYQSTYTTNF VPQDGINSIK |
| dq473492-73 | EHTSRVKVTT RIYHKAKHVK AWCPRPPRAV EYTNAHVTNY KPTDGEVTTA |
| dq473494-74 | EHDARVEITT RVYHKAKHVK AWCPRPPRAV EYTHTHVTNY KPQEGDVT.. |
| dq473510-75 | EHRNKVEVTT RIYHKAKHIK AWCPRPPRAV EYTFRRVTNY KRDGQQVEI. |
| dq473502-76 | DHKHKIEVTT RVYHKAKHVK VWCPRPPRAV EYTYTHVTNY KPHSGDVQ.. |
| hrv-76 | DHKHKIEVTT RIYHKAKHVK VWCPRPPRAV EYTYTHVTNY KPHSGDVQ.. |
| hrv-77 | QQNHEVEITT RVYHKAKHIK AWCPRPPRAV PYTAVDSTNY KPMRGDVQI. |
| hrv-78 | QQQHKVTITA RVYHKAKHIS AWGPRPPRAV PYQHIYNPNY KTEEGTPD.. |
| ef173418-78 | QQQHKVTITA RVYHKAKHIS AWGPRPPRAV PYQHIYNPNY KTEEGTPD.. |
| hrv-80 | QQKHKVLITS RIYHKAKHIK AWCPRAPRAV PYQHTYSPNF KNTDESIPDT |
| hrv-81 | EQVHKVKIVT RIYHKAKHTK AWCPRPPRAV QYTHTHVTNY KLETDVHTS. |
| hrv-81-f06 | EQVHKVKVVT RIYHKAKHTK AWCPRPPRAV QYTHTHVTNY KLETDVHTS. |
| hrv-81-f07 | EQVHKVKVVT RIYHKAKHTK AWCPRPPRAV QYTHTHVTNY KLETDVHTS. |
| hrv-82 | EHQTQVSITT RIYHKAKHVK AWCPRPPRAV GYTHTHVTNY KPSQGDYSVV |
| dq473509-82 | EHQTQVNITT RIYHKAKHVK AWCPRPPRAV GYTHTHVTNY KPSEGDYSVS |
| hrv-85 | KQQHEVEITT RVYHKAKHVK AWCPRAPRAV PYTHTRSTNY VPQDGEVK.. |
| pico-85 | KQQHEVEITT RVYHKAKHVK AWCPRAPRAV PYTHTRSTNY VPQDGEVK.. |
| dq473504-88 | TQKHKLNIIS RIYHKAKHIK AWCPRPPRAV PYQHTHSTNY VPKDGEVATQ |
| a10937-89 | NQKHDSNIVC RIYHKAKHIK AWCPRPPRAV AYQHTHSTNY IPSNGEATTQ |
| hrv-89 | NQKHDLNIVC RIYHKAKHIK AWCPRPPRAV AYQHTHSTNY IPSNGEATTQ |
| hrv-89-f08 | NQKHDLNIVC RIYHKAKHIK AWCPRPPRAV AYQHTHSTNY IPLNGEATTQ |
| hrv-89-f09 | NQKHDLNIVC RIYHKAKHIK AWCPRPPRAV AYQHTHSTNY IPLNGEATTQ |
| m16248-89 | NQKHDSNIVC RIYHKAKHIK AWCPRPPRAV AYQHTHSTNY IPSNGEATTQ |
| hrv-90 | EHAHKIEITT RIYHKAKHIK VWCPRPPRAV EYTHTHVTNY KHATRELK.. |
| hrv-94 | EHKTQVNITT RVYHKAKHVK AWCPRPPRAV GYTHTHVTNY KPSEGEYKPP |
| ef173419-94 | EHKTQVNITT RVYHKAKHVK AWCPRPPRAV GYTHTHVTNY KPSEGEYKPP |
| hrv-95 | KQKIKTKIDS RIYLKAKHIK AWCPRPPRAV TYNHIYNPNY VREGVTPE.. |
| hrv-96 | EHTNKVKITT RVYHKAKHVK VWCPRPPRAV EYTNVHLTNY KPNNEVTTF. |
| hrv-98 | KQEHPVEITT RVYHKAKHIR AWCPRAPRAV PYTHTRSTNY MPQDGEPT.. |
| hrv-100 | QQAHEVEITT NIYHKAKHVK AWCPRPPRAV PYTHSHSTNY KPHEGDVKI. |
| ef186077-qpm | TGASD....I KVFGKPKHIT AWIPRPPRAT QYLHKFSTNY NKPKTSGSTE |
| ef077279-nat001 | AENSE....I KIFAKPKHTT AWIPRPPRAT QYLHKFSTNY NKQKPDSGGQ |
| ny1078 | TTKND....V KVFAKPKHTT AWIPRPPRAT QYTLKYSTNY NVIKKGTTSD |
| ef582385-c024 | TNEHS....I RVFVKPKHTI AWIPRPPRAT QYTHKFSTNY HVKKPDDTTG |
| ef077280-nat045 | TAKQD....V KVFVKPKHIT AWCPRPPRAV DYTHRYSPNY HTNK.GSTTE |
| ef582387-c026 | TEVSD....I KVFAKPKHTA AWIPRPPRAT QYLHKFSTNY NKPKTKGSNE |
| ef582386-c025 | NSGTDI...I RIFGKPKHTR AWIPRPPRAT EYTHKDSTNY NRRVNPNSED |
| dq473485-03 | HDVHTTIVKI RVYHRAKHVE AWIPRAPRAL PYVSIGRTNY PRDSKT.... |
| ef173422-03 | HDVHTTIVKI RVYHRAKHVE AWIPRAPRAL PYVSIGRTNY PRDSKT.... |
| dq473490-04 | HDKHTTHVKI RVYHRAKHIR AWIPRAPRAL QYLYIGRTNY SPNPVS.... |
| hrv-05 | HDNHTTHVKV RVYHRAKHIR AWVPRAPRAL EYLHIGRTNY KQSPQN.... |
| dq473486-06 | HDAHKTLVKI RVYHRAKHVE AWIPRAPRAL PYETIGRTNY PKKNKIV... |
| l05355-14 | HDEHKTLVKI RVYHRAKHVE AWIPRAPRAL PYTSIGRTNY PKNTE..... |
| k02121-14 | HDEHKTLVKI RVYHRAKLVE AWIPRAPRAL PYTSIGRTNY PKNTE..... |
| ef173420-17 | HDVHTTLVKI RVFHRAKHIR AWVPRPPRAL PYTSIGRTNF PNTRNK.... |
| hrv-26 | HDSHTTHVKI RVYHRAKHVR AWVPRAPRAL QYLHIGRTNY DPQSKN.... |
| hrv-27 | NDVHLTKVKI RVYHRAKHVL AWIPRPPRAK PYLSIGRTNY EKTGN..... |
| ef173421-27 | NDVHLTKVKI RVYHRAKHVL AWIPRPPRAK PYLSIGRTNY EKTGN..... |
| dq473487-35 | HDVHTTLVKI RVYHRAKHVQ AWIPRAPRAL PYVSIGRSNY DKSAK..... |
| hrv-35 | HDVHTTLVKI RVYHRAKHVQ AWIPRAPRAL PYVSIGRSNY DKSAK..... |
| ef173423-37 | HDAHTTLVKI RVYHRAKHVE AWIPRAPRAL PYEAIGKTNY PKMIT..... |
| hrv-42 | HDIHTTHVKI RVYHRAKHIR AWIPRAPRVL EYLHIGRTNY KQNPKN.... |
| dq473488-48 | HDSHTTLVKI RVFHRAKHIR AWLPRPPRAL PYTSIGRTNF PTQHGK.... |
| hrv-52 | HDLHKTLVKI RVFHRAKHIR AWVPRPPRAL PYTSIGRTNF PLNHGK.... |
| hrv-52-f10 | HDFHKTLVKI RVFHRAKHIR AWVPRPPRAL PYTSIGRTNF PLSHGK.... |
| ef173424-52 | HDLHKTLVKI RVFHRAKHIR AWVPRPPRAL PYTSIGRTNF PLNHGK.... |
| hrv-69 | HDEHTTIVKI RVFHRAKHIR AWIPRPPRAL PYTSIGRTNF PNTHGK.... |
| dq473489-70 | HDVHTTLVKI RVFHRAKHIR AWVPRPPRAL PYTSIGKTNF PNTHSK.... |
| hrv-72 | HDTHRTLVKI RVYHRAKHIE AWVPRAPRAL PYTSIGRTNY PKNPK..... |
| hrv-79 | HDTHTTEVKI RVYHRAKHVE AWIPRAPRAL PYMSIGRTNY QRDAK..... |
| hrv-83 | HDAHTTEVKI RVYHRAKHVQ VWVPRAPRAL PYVSIGRTNY ERQNIK.... |
| hrv-84 | NDQHXTKVKI RIYHRAKHVM AWIPRPPRAK PYLHIGRTNY DGSQS..... |
| hrv-86 | HDLHKTVVKI RVYHRAKHIQ TWIPRAPRAL PYETIGRTNF PRNPPK.... |
| hrv-91 | HDVHTTLVKI RVFHRPKHIR AWIPRPPRAL PYTSIGRTNF PNRHSK.... |
| hrv-92 | HDAHTTEVKI RVYHRAKHVE AWIPRAPRAL PYVSIGRTNY NKQAIV.... |
| ef173425-93 | NDAHLTKVKI RVYHRAKHVM AWIPRPPRAK PYLKIGRTNY DKSGH..... |
| hrv-97 | NDVHLTKVKI RVYHRAKHVM AWIPRPPRAK PYLKIGRTNY TGSDN..... |
| hrv-99 | HDTHTTYVKI RVYHRAKHIR AWIPRAPRAL QYLHIGRTNY DLNSTN.... |
| | 901 950 |
| annotation | .......... ........VG P....HHH.. BBBBB..HHH .....HHH.. |
| af499637-cva13 | ......TPLP IK..NLTTYG FGHQLKAVYV AGYKIVNYHL ATSEDYRNCV |
| af546702-cva21 | ......LPLT .KVDSITTFG FGHQNKAVYV AGYKICNYHL ATPSDHLNAI |
| v01149-pv1m | ......TPLS TKD..LTTYG FGHQNKAVYT AGYKICNYHL ATQDDLQNAV |
| d00239-01 | .......TAI VPRASMKTVG PSDLYVHVGN LIYRN..LHL FNSE.MHDSI |
| pico-01 | .......TAI VRRNTITTAG PSDLYVHVGN LIYRN..LHL FNSE.MHDSI |
| hrv-01 | .......TAI VRRNTITTAG PSDLYVHVGN LIYRN..LHL FNSE.MHDSI |
| x02316-02 | .......TAI VTRPIITTAG PSDMYVHVGN LIYRN..LHL FNSE.MHESI |
| hrv-07 | ......IKTR ANLFTLKSAG PSSMYVHVGN LIYRN..LHL FNSE.LHDSI |
| dq473503-07 | ......IKTR ANLFTLKSAG PSSMYVHVGN LIYRN..LHL FNSE.LHDSI |
| hrv-08 | .......TKV KYRAEVTTIG PSEMFVHTTN LMYRN..YHL TPEQELDSAI |
| pico-09 | ......IPVR DNVRAVKNVG PSDMYVHVGN LIYRN..LHL FNSE.ANNSV |
| hrv-09 | ......IPVR DNVRAVKNVG PSDMYVHVGN LIYRN..LHL FNSE.ANDSV |
| hrv-09-f01 | ......IPVR DNVRAVRNVG PSDMYVHVGN LIYRN..LHL FNSE.ANDSV |
| hrv-09-f02 | ......IPVR DNVRAVRNVG PSDMYVHVGN LIYRN..LHL FNSE.ANDSV |
| dq473498-10 | ......FIRS RDDPKVVTAG PSDMYVHVGN LIYRN..LHL FNSE.MHDSI |
| hrv-10 | ......FIRS RDDPKVVTAG PSDMYVHVGN LIYRN..LHL FNSE.MHDSI |
| ef173414-11 | .......TAV KARKTIKTAG PSDMYVHVGN LIYRN..LHL FNSD.INDSI |
| ef173415-12 | .......NRV KLRETLTTVG PSDLYVHCGD LIYRN..LHL CEPEHLNDSV |
| hrv-13 | ......IVPR ANVREIRNFG PSDMYVHVGN LIYRN..LHL FNSE.MHDSI |
| hrv-13-f03 | ......IVPR TNVREIRNFG PSDMYVHVGN LIYRN..LHL FNSE.MHDSI |
| dq473493-15 | ......IPTR ENVRAIVNVG PSDMYVHVGN LIYRN..LHL FNSE.ANDSV |
| l24917-16 | .......VAI RPRTNLTTVG PSDMYVHVGN LIYRN..LHL FNSD.IHDSI |
| hrv-18 | .......TAI VPRARITMAG PSDMYVHVGN LIYRN..LHL FNSE.MHDSI |
| hrv-19 | ......IEIR DNPRHIKNVG PSDMYVHVGN LIYRN..LHL FNSD.MHDSI |
| hrv-20 | IRFRNTVKDL TYPTEMTNVG PSDLYVHAGN LIYRN..LHL CEPENLNDST |
| hrv-21 | .......SAV ESRRTIVTVG PSDMYVHVGN LIYRN..LHL FNSE.MHDSI |
| hrv-22 | ......IPTR ANPRQILNVG PSDMYVHVGN LIYRN..LHL FNSD.IHDSV |
| dq473497-23 | .......SRV AHRPAVITAG PSDMYVHVGN LIYRN..LHL FNSE.MHESI |
| hrv-24 | .......TAI EPRRGIKTVG PSDMYVHVGN LIYRN..LHL FNSE.MHDSI |
| ef173416-24 | .......TAI EPRRGIKTVG PSDMYVHVGN LIYRN..LHL FNSE.MHDSI |
| hrv-25 | ........FI QPRNSLKTAG PSDMYVHVGN LIYRN..LHL FNSE.MHDSI |
| dq473508-28 | ......IKFR TDVKQITTVG PSDLYVHTGN LVYRN..LHL CEPENLNDST |
| hrv-29 | .........V ESRPSLMTAG PSDMYVHVGD LIYRN..LHL CNSE.MHDSI |
| dq473512-30 | .......SRV EHRARVTTAG PSDMYVHVGN LIYRN..LHL FNSE.MHDSI |
| hrv-30 | .......SRV EHRARVTTAG PSDMYVHVGN LIYRN..LHL FNSE.MHDSI |
| hrv-31 | ......FVKH RDNPKIITAG PSDLFVHVGN LIYRN..LHL FNSE.MHDSV |
| hrv-32 | ......IQTR EHVRAVKNVG PSDMYVHVGN LIYRN..LHL FNSE.ASDSV |
| hrv-33 | .......TAI RPRATIKTAG PSDMYVHVGN LIYRN..LHL FNSD.IHDSI |
| hrv-34 | .......TAI KHRAKITMAG PSDMYVHVGN LIYRN..LHL FNSE.MHDSI |
| dq473501-34 | .......TAI KHRAKITMAG PSDMYVHVGN LIYRN..LHL FNSE.MHDSI |
| dq473505-36 | .......TQI KTRPNVFTVG PSSMFVHVGN LIYRN..LHL FNSA.LDDSI |
| hrv-38 | ......IPTR TNIRTIVNVG PSDMYVHVGN LIYRN..LHL FNSE.VSDSV |
| dq473495-38 | ......IPTR TNIRTIVNVG PSDMYVHVGN LIYRN..LHL FNSE.VSDSV |
| ay751783-39 | .......LFI KPRENLTTAG PSDMYVHVGN LIYRN..LHL FNSE.MHDSI |
| hrv-40 | .......IFL KERASLTTVG PSDMYVHVGN LIYRN..LHL FNSE.MHDSI |
| dq473491-41 | .....SVRPR DNVRQVRNYG PSDMYVHVGN LIYRN..LHL FNSE.MHDSI |
| hrv-43 | ......AIVS RRDIKIVNAG PTDMYVHVGN LIYRN..LHL FNSE.MHESV |
| dq473499-44 | .........V EPRHSIMTAG PSDMYVHAGN LIYRN..LHL CNSE.MHDSI |
| hrv-45 | ........KV QTRANVTTVG PSDMFIHASE FLYRN..YHL TPEKELKEAC |
| dq473506-46 | T....HIKIR RDIKYIKTAG PSDPHVHAGD LIYRN..LHL CESENLNDSI |
| hrv-47 | ......FIEH RENPKFITAG PSDLFVHVGN LIYRN..LHL FNSE.AHDSV |
| dq473496-49 | .......TGI TSRAIITTAG PSDMYVHVGN LIYRN..LHL FNSE.MHESI |
| hrv-49-f04 | .......TGI KSRPIITTAG PSDMYVHVGN LIYRN..LHL FNSE.MHESI |
| hrv-50 | .......TAI ATRPKITVAG PSDMYVHVGN LIYRN..LHL FNSE.MHDSI |
| hrv-51 | ....KTQIKT RADIKLVNFG PSDLFVHMDD LVYRN..LHL CEPENLNDSV |
| dq473507-53 | I...KFRPDV KDVTSVMTAG PSDLYVHSSN FIYKN..LHL CEPENLNDSV |
| hrv-54 | .......IFL KHRTNLVTAG PSDMYVHVGN LIYRN..LHL FNSE.MHDSI |
| hrv-54-f05 | .......IFL KHRETLTTAG PSDMYVHVGN LIYRN..LHL FNSE.MHDSI |
| dq473511-55 | .......TAI KYRRDIKTVG PSDMYVHVGN LIYRN..LHL FNSD.MHDSI |
| hrv-56 | .......IFL KPRPSLTTFG PSDMYVHVGN LIYRN..LHL FNSD.MHDSI |
| hrv-57 | ......IKYR RDIKVVKNVG PSDMYVHVGN LIYRN..LHL FNSD.MHDSI |
| hrv-58 | ......IKPR TNVFTITSAG PSSMFVHVGN LIYRN..LHL FNSD.LDDSI |
| dq473500-59 | .......IFL KPRMNITTAG PSDMYVHVDN LIYRN..LHL FNSE.MHESV |
| hrv-60 | ......IPIR TDIRAIRTVG PSDMYVHVGN LIYRN..LHL FNSE.ISDSV |
| hrv-61 | T....FIKPR ANLREIRTFG PSDMYVHVGN LIYRN..LHL FNSE.AHDSV |
| hrv-62 | ........FI KSRQNLQTAG PSDMYVHVGN LIYRN..LHL FNSE.MHDTI |
| hrv-63 | .......IFL KPRATIKTAG PSDMYVHVGN LIYRN..LHL FNSE.MHESI |
| hrv-64 | ......VPSR NSPRDIVTVG PSDMYVHVGN LIYRN..LHL CNSD.MHDSI |
| ef173417-64 | ......VPSR NSPRDIVTVG PSDMYVHVGN LIYRN..LHL CNSD.MHDSI |
| hrv-65 | .....TQIKT RDNIKIVNFG PSDMFVHMDD LIYRN..LHL CEPENLNDSV |
| hrv-66 | ......FIKP RTDPKVVNVG PSDMFVHAGN LIYRN..LHL FNSE.MHDSV |
| hrv-67 | ......IPVR ADVRTIRNVG PSDLYVHVGN LIYRN..LHL FNSE.ANDSV |
| hrv-68 | IKFRNTVKDL AYPPELANLG PSDLYVHTGN LIYRN..LHL CEPENLNDST |
| hrv-71 | T....KIKIR RDIKEVSNYG PSDLHVHMGN LVYRN..LHL CDHENLNDSV |
| dq473492-73 | ......IRHR DNVRAIQNFG PSDMYVHVGN LIYRN..LHL FNSE.MHDSI |
| dq473494-74 | .......TVI PTRRSIVNVG PSDMYVHVGN LIYRN..LHL FNSE.ANDSV |
| dq473510-75 | ......AIEP RRDVKFVNAG PTDLYVHVGN LIYRN..LHL LNSE.MHDSI |
| dq473502-76 | .......TAI RPRATIKTAG PSDMYVHVGN LIYRN..LHL FNSD.IHDSI |
| hrv-76 | .......TAI RPRATIKTAG PSDMYVHVGN LIYRN..LHL FNSD.IHDSI |
| hrv-77 | ......FIKE RASPKVVTFG PSDMFVHVGN LVYRN..LHL CNSE.MHDSV |
| hrv-78 | .......TKV AIRANIKTVG PSDLYVHVGN LVYRN..LHL CTNENLSDST |
| ef173418-78 | .......TKV AIRANIKTVG PSDLYVHVGN LVYRN..LHL CTNENLSDST |
| hrv-80 | .....QIKIR DNIRQVRTVG PSDLYVHTGE LIYRN..LHL CEPENLDDSV |
| hrv-81 | .......VAI KPRTSLTNVG PSDMYVHVGN LIYRN..LHL FNSD.MHDSI |
| hrv-81-f06 | .......VAI RPRTSLTNVG PSDMYVHVGN LIYRN..LHL FNSD.MHDSI |
| hrv-81-f07 | .......VAI RPRTSLTNVG PSDMYVHVGN LIYRN..LHL FNSD.MHDSI |
| hrv-82 | ......IPVR ESPRQILNVG PSDMYVHVGN LIYRN..LHL FNSD.AHDSI |
| dq473509-82 | ......IPIR DSPRHILNVG PSDMYVHVGN LIYRN..LHL FNSD.VHDSI |
| hrv-85 | ......IFLK E.RASLTTAG PSDMYVHVGN LIYRN..LHL FNSE.MHDSI |
| pico-85 | ......IFLK E.RASLTTAG PSDMYVHVGN LIYRN..LHL FNSE.MHDSI |
| dq473504-88 | ......IKTR RDVYTVTTAG PSSMYVHVGN LIYRN..LHL FNSD.LDESI |
| a10937-89 | ......IKTR PDVFTVTNVG PSSMFVHVGN LIYRN..LHL FNSD.LDDSI |
| hrv-89 | ......IKTR PDVFTVTNVG PSSMFVHVGN LIYRN..LHL FNSD.LDDSI |
| hrv-89-f08 | ......IKTR PDVFTITNVG PSSMFVHVGN LIYRN..LHL FNSD.LDDSI |
| hrv-89-f09 | ......IKTR PDVFTITNVG PSSMFVHVGN LIYRN..LHL FNSD.LDDSI |
| m16248-89 | ......IKTR PDVFTVTNVG PSSMFVHVGN LIYRN..LHL FNSD.LDDSI |
| hrv-90 | .......TAI RPRKTITTAG PSDMYVHVGN LIYRN..LHL FNSE.MYDSV |
| hrv-94 | ......VPVR NSPRDIVTVG PSDMYVHVGN LIYRN..LHL FNSE.MHDSI |
| ef173419-94 | ......VPVR NSPRDIVTVG PSDMYVHVGN LIYRN..LHL FNSE.MHDSI |
| hrv-95 | .......TKV KYRAEVTTIG PSEMFVHTTN LMYRN..YHL TPEQELDSAI |
| hrv-96 | ......IKPR ENLRDIRNFG PSDMYVHVGN LIYRN..LHL FNSE.ISDSV |
| hrv-98 | .......IFL KHRKDLVTAG PSDMYVHVGN LIYRN..LHL FNSE.MHDSI |
| hrv-100 | ......FIRP RDDPKFVTAG PSDMYVHVGN LIYRN..LHL FNSE.MHDSI |
| ef186077-qpm | LEPKHFFKYR QDITSITNLG PSDMYVHTKE AIYKC..AHL ..TEPNENTI |
| ef077279-nat001 | VEPKHFLNTR N...DIKNLG PSDMFVHTKE AIYKC..AHL ..TKPNEQTI |
| ny1078 | LEQKHFLTYR TDIT...NVG PSDMFVHTKE AVYKC..AHL ..TTPSEKTI |
| ef582385-c024 | LL..IQKHFI NHRTDIKTAG PSDLFVHTAT MIYRN..AHL ..TSLNDKTV |
| ef077280-nat045 | LEEKHYIN.. .TRTTIKTAG PSDLFVHTEQ AIYKN..AHL ..TTPNDQTI |
| ef582387-c026 | LEPKHFLKYR DDITSITTLG PSDMYVHTKE AIYRC..AHL ..TEPNENTI |
| ef582386-c025 | ST.LTRDHYI KTRATVTTAG PSDMYVHTKE AIYRN..AHL ..TSANEQTI |
| dq473485-03 | ........II KKRTNIKTYG LGPRFGGVFT SNVKIINYHL MTPDDHLNLV |
| ef173422-03 | ........II KKRTNIKTYG LGPRFGGVFT SNVKIINYHL MTPDDHLNLV |
| dq473490-04 | ......PI.. KTRESINTYG LGPRFGGVHT GNIKIMNYHL MTHEDNLRLL |
| hrv-05 | ......PI.. KTRKTISTYG LGPRFGGVCT GNIKIMNYHL MTHEDNLNLV |
| dq473486-06 | ......PVI. KKRENITTYG LGSRYGGVFT SNVKIMNYHL MTPEDHLNLI |
| l05355-14 | ......PVIK KRKGDIKSYG LGPRYGGIYT SNVKIMNYHL MTPEDHHNLI |
| k02121-14 | ......PVIK KRKGDIKSYG LGPRYGGIYT SNVKIMNYHL MTPEDHHNLI |
| ef173420-17 | ........VI ARRDSITTYG GNLKFGAVYT CNYKIMNYHL MTHEDHLNLL |
| hrv-26 | ......PI.. KTRXTISTYG LGPRFGGIHT GNVKIMNYHL MTHEDNLNLI |
| hrv-27 | ........II PKRNNISTYG LGPRFGGVCT GNIKIMNYHL MTHEDTLNLQ |
| ef173421-27 | ........II PKRNNISTYG LGPRFGGVCT GNIKIMNYHL MTHEDTLNLQ |
| dq473487-35 | ......PVI. KRREQITKYG LGPRFGGVFT SNFKIMNYHL MTPEDHLNLI |
| hrv-35 | ......PVI. KRREQITKYG LGPRFGGVFT SNFKIMNYHL MTPEDHLNLI |
| ef173423-37 | ......PVI. KKRDNITTYG LGSRYGGVFT SNVKIMNYHL MTPEDHLNLI |
| hrv-42 | ......PI.. KTRDSISTYG LGPRFGGVCT GNIKIMNYHL MSHEDTLNLV |
| dq473488-48 | ........VI AKRESLHTYG SNPRFGAIYT CNYKIMNYHL MTQEDHLNLL |
| hrv-52 | ........II AKRDKITTYG GNSRFGAVYT CNYKIMNYHL MTQEDHLNLL |
| hrv-52-f10 | ........II AKREKITTYG GSPRFGAIYT CNYKIMNYHL MTQEDHLNLL |
| ef173424-52 | ........II AKRDKITTYG GNSRFGAVYT CNYKIMNYHL MTQEDHLNLL |
| hrv-69 | ........VI TRRNKITTYG GSPRFGAVYT CNYKIMNYHL MTHEDHLNLL |
| dq473489-70 | ........VI ATRDSITTYG GNSRFGAIYT CNYKIMNYHL MTHEDYLNLL |
| hrv-72 | ......PVIK KREGDIKTYG LGPRFGGVYT SNAKIMNFHL MTPEDHLNLV |
| hrv-79 | ......PII. AKRENIMKYG LGPRFGGVFT SNVKIMNYHL MTPEDHLNLV |
| hrv-83 | ......PVI. EKRTSIKQYG LGPRFGGVYT GNVKIMNYHL MTPEDQLNLV |
| hrv-84 | ........II PKRDTISTYG LGPRFGGVCT GSVKVMNYHL MTQEDSLNLQ |
| hrv-86 | ........II KKRDTINTYG LGPRFGGIFT GNVKIMNYHL MTPEDHLNLV |
| hrv-91 | ........VI ATRDSITTYG GNSRFGAVYT CNYKIMNYHL MTHEDHLNLL |
| hrv-92 | ......PVI. KKRSLITNYG IGPRFGGVFT GNVKIMNYHL MTPEDHLNLV |
| ef173425-93 | ........VI PKRDGISTYG FGPRFGGVCT GNIKIMNYHL MTHEDMLNLQ |
| hrv-97 | ........II PKRKGISTYG FGPRFGGVCT GSIKIMNYHL MTHEDTLNLQ |
| hrv-99 | ......PI.. KTRDSISTYG LGPRFGGVCT GNVKIMNYHL MTHEDNLNLI |
| | 951 1000 |
| annotation | BBBHHHDBBB BB........ .......BBB BBBHHH.BBB BBB.BBB.BB |
| af499637-cva13 | RSMWERDLMV VESKAQGSDQ IARCSCKTGV YYCESRNKHY PITITAPTFQ |
| af546702-cva21 | SMLWDRDLMV VESRAQGTDT IARCSCRCGV YYCESRRKYY PVTFTGPTFR |
| v01149-pv1m | NVMWSRDLLV TESRAQGTDS IARCNCNAGV YYCESRRKYY PVSFVGPTFQ |
| d00239-01 | LVSYSSDLII YRTNTTGDDY IPSCNCTEAT YYCKHKNRYY PIKVTPHDWY |
| pico-01 | LVSYSSDLII YRTNTIGDDY IPNCNCTEAT YYCRHKNRYY PIKVTPHDWY |
| hrv-01 | LISYSSDLII YRTNTIGDDY IPNCNCTEAT YYCRHKNRYY PIKVTPHDWY |
| x02316-02 | LVSYSSDLII YRTNTVGDDY IPSCDCTQAT YYCKHKNRYF PITVTSHDWY |
| hrv-07 | LVSYSSDLII YRTNTEGDDV IPNCNCTDCT YYCYHKDRYF PIKVTAHDWY |
| dq473503-07 | LVSYSSDLII YRTNTEGDDV IPNCNCTDCT YYCYHKDRYF PIKVTAHDWY |
| hrv-08 | QVVYTADLVI HRTNDKGDDY IPDCNCTDCC YYCAHKNRYI PVKVRYYNYY |
| pico-09 | LISYSSDLVI YRTNTIGDDY IPTCDCTDAT YYCKHKNRYY PIKVTSHDWY |
| hrv-09 | LISYSSDLVI YRTNTIGDDY IPTCDCTDAT YYCKHKNRYY PIKVTSHDWY |
| hrv-09-f01 | LISYSSDLVI YRTNTTGDDY IPTCDCTDAT YYCKHKNRYY PIKVTSHDWY |
| hrv-09-f02 | LISYSSDLVI YRTNTTGDDY IPTCDCTDAT YYCKHKNRYY PIKVTSHDWY |
| dq473498-10 | LVSYSSDLVI YRTNTIGNDY IPTCDCTDAT YYCKHKDRYY PIKVTSHDWY |
| hrv-10 | LVSYSSDLVI YRTNTIGNDY IPTCDCTDAT YYCKHKDRYY PIKVTSHDWY |
| ef173414-11 | LVSYSSDLVI YRTNTVGDDY IPTCDCTDAT YFCKHKNRYY PIKVTSHDWY |
| ef173415-12 | LICYSSDLVI YRTNSKGDDY VPSCDCTDCT FYSKHKDRYF PITVKKYNWF |
| hrv-13 | LVSYSSDLVI YRTNTIGDDY IPSCDCTQAT YYCKHKNRYY PIEVTSHDWY |
| hrv-13-f03 | LVSYSSDLVI YRTNTIGDDY IPACDCTQAT YYCKHKNRYY PINVTSHDWY |
| dq473493-15 | LISYSSDLVI YRTNTKGDDY IPTCDCTQAT YYCRHKNRYY PIEVTSHDWY |
| 124917-16 | LVSYSSDLII YRTSTQGDGY IPTCNCTEAT YYCKHKNRYY PINVTPHDWY |
| hrv-18 | LISYSSDLVI YRTNTTGDDY IPTCDCTDAT YYCKHKNRYY PIKVTSHDWY |
| hrv-19 | LVSYSSDLVI YRTNTVGDDY IPTCDCTDAT YYCKHKNRYF PIKVTSHDWY |
| hrv-20 | LIRYSSDLVI YRTNTTGDDM IPTCDCTQAT YYCKHKDRYY PINVRKHQWY |
| hrv-21 | LISYSSDLVI YRTNTTGDDY IPTCDCTEAT YYCKHKNRYF PIKVTSHDWY |
| hrv-22 | LVSYSSDLVI YRTNTTGDDY IPTCDCTDAT YYCKHKNRYY PIKVTSHDWY |
| dq473497-23 | LVSYSSDLII YRTNTIGDDY IPSCDCTQAT YYCKHKNRYF PITVTSHDWY |
| hrv-24 | LISYSSDLVI YRTNTIGDDY IPTCDCTEAT YYCKHKNRYY PIKVTSHDWY |
| ef173416-24 | LISYSSDLVI YRTNTIGDDY IPTCDCTEAT YYCKHKNRYY PIKVTSHDWY |
| hrv-25 | LVSHSSDLVI YRTNTTGNDY IPTCDCTDAT YYCKHKDRYY PIKVTSHDWY |
| dq473508-28 | LICYSSDLVI YRTNTTGNDV IPTCNCTEAT YYCKHKDRYY PINVKKHQWY |
| hrv-29 | LISYSSDLVI YRTNTTGNDY IPTCDCTDAT YYCKHKDRYY PIKVTSHDWY |
| dq473512-30 | LVSYSSDLII YRTNTVGDDY IPSCDCTQAT YYCKHKNRYF PITVTSHDWY |
| hrv-30 | LVSYSSDLII YRTNTVGDDY IPSCDCTQAT YYCKHKNRYF PITVTSHDWY |
| hrv-31 | LVSYSSDLVI YRTNTTGNDY IPTCDCTQAT YYCKHKDRYY PIVVTSHDWY |
| hrv-32 | LISHSSDLVI YRTNTTGDDY IPTCDCTDAT YYCRHKNRYY PIKVTSHDWY |
| hrv-33 | SVSYSSDLVI YRTNTTGDDY IPTCDCTDAT YFCKHKNRYY PIKVTSHDWY |
| hrv-34 | LISYSSDLVI YRTNTIGDDY IPTCDCTEAT YFCKHKNRYF PIRVTSHDWY |
| dq473501-34 | LISYSSDLVI YRTNTIGDDY IPTCDCTEAT YFCKHKNRYF PIRVTSHDWY |
| dq473505-36 | LVSYSSDLVI YRTNTEGDDV IPNCDCTECT YYCHHKDRYF PIKVTPHDWY |
| hrv-38 | LVSYSSDLVI YRTNTTGDDY IPTCDCTDAT YYCKHKNRYF PIKVTSHDWY |
| dq473495-38 | LVSYSSDLVI YRTNTTGDDY IPTCDCTDAT YYCKHKNRYF PIKVTSHDWY |
| ay751783-39 | LVSYSSDLVI YRTNTQGDDY IPTCDCTQAT YYCKHKNRYF PITVTSHDWY |
| hrv-40 | LVSHSSDLVI YRTNTIGDDY IPTCDCTEAT YYCKHKNRYY PIKVTSHDWY |
| dq473491-41 | LVSYSSDLVI YRTNTIGDDY IPSCDCTQAT YYCKHKNRYY PITVTSHDWY |
| hrv-43 | LVSYSSDLVI YRTNTVGDDY IPTCDCTDAT YYCKHKNRYY PIKVTSHDWY |
| dq473499-44 | LISYSSDLVI YRTNTTGNDY IPTCDCTDAT YYCKHKDRYY PIKVTSHDWY |
| hrv-45 | QIVYTADLVI HRTRDKGDDY IPQCNCTDCC YYCAHKDRYI PIKVEYHSYY |
| dq473506-46 | LISYSSDLVI YRTNTTGDDI VPTCDCTLGT YYCKHKDRYY PVSVTKHQWY |
| hrv-47 | LVSYSSDLVI YRTNTTGNDY IPTCDCTQAT YYCRHKDRYY PIDVTSHDWY |
| dq473496-49 | LVSYSSDLII YRTNTIGDDY IPSCDCTQAT YYCKHKNRYF PITVTSHDWY |
| hrv-49-f04 | LVSYSSDLII YRTNTIGDDY IPSCDCTQAT YYCKHKSRYF PITVTSHDWY |
| hrv-50 | LVSYSSDLVI YRTNTIGDDY IPTCDCTDAT YYCKHKNRYY PIKVTSHDWY |
| hrv-51 | LICYSSDLVI YRTNTKGDDV IPTCDCTQAT YYCKHKNRYY PINVKKHDWY |
| dq473507-53 | LISYSSDLVI YRTNTTGDDI IPTCDCTLGT YYCKHKDRYY PISVTKHQWY |
| hrv-54 | LVSYSSDLVI YRTNTIGDDY IPTCDCTEAT YYCKHKNRYY PIKVTSHDWY |
| hrv-54-f05 | LISYSSDLVI YRTNTIGDDY IPTCDCTEAT YYCKHKNRYY PIKVTSHDWY |
| dq473511-55 | LVSYSSDLVI YRTNTIGDDY IPTCDCTEAT YYCKHKNRYY PIKVTSHDWY |
| hrv-56 | LVSYSSDLVI YRTNTTGDDY IPTCDCTQAT YYCKHKNRYF PINVNSHDWY |
| hrv-57 | LVSYSSDLVI YRTNTTGDDY IPTCDCTEAT YYCRHKNRYY PIKVTSHDWY |
| hrv-58 | LVSYSSDLII HRTNTEGDDI IPNCDCTECT YYCHHRDRYF PIKVTAHDWY |
| dq473500-59 | LVSYSSDLVI YRTNTKGDDY IPTCDCTQAT YYCKHKNRYY PINVTSHDWY |
| hrv-60 | LVSYSSDLVI YRTNTTGDDY IPTCDCTDAT YYCKHKNRYY PIKVTSHDWY |
| hrv-61 | LVSYSSDLVI YRTNTVGDDF IPTCDCTQAT YYCKHKNRYF PITVTSHDWY |
| hrv-62 | LVSXSSDLVI YRTNTTGDDY IPTCDCTDAT YYCKHKNRYY PIKVTSHDWY |
| hrv-63 | LISYSSDLVI YRTNTKGDDY IPTCDCTQAT YYCKHKNRYY PINVTSHDWY |
| hrv-64 | LVSYSSDLVI YRTNTIGDDY IPMCDCTDAT YYCKHKNRYY PIKVTSHDWY |
| ef173417-64 | LVSYSSDLVI YRTNTIGDDY IPMCDCTDAT YYCKHKNRYY PIKVTSHDWY |
| hrv-65 | SICYSSDLVI YRTNTKGDDL IPTCNCTQAT YYCKHKNRYY PINVKKHDWY |
| hrv-66 | LVSYSSDLVI YRTNTTGNDY IPTCDCTDAT YYCRHKDRYY PIKVTSHDWY |
| hrv-67 | LISYSSDLVI YRTNTVGDDY IPTCDCTEAT YYCRHKNRYY PIRVTSHDWY |
| hrv-68 | LICYSSDLVI YRTNTTGDDI IPTCDCTQAT YYCKHKDRYY PINVRKYQWY |
| hrv-71 | LIRYSSDLVI YRTNTEGDDF IPTCNCTQAT YYCKHKNRYF PINVKKHEWY |
| dq473492-73 | LVSYSSDLVI YRTNTIGDDF IPSCDCTEAT YYCKHKNRYY PIKVTSHDWY |
| dq473494-74 | LISYSSDLVI YRTNTKGDDY IPTCDCTEAT YYCKHKNRYY PIKVTSHDWY |
| dq473510-75 | LISYSSDLII YRTNTKGDDY IPTCDCTEAT YYCRHKNRYY PIKVTSHDWY |
| dq473502-76 | LVSYSSDLVI YRTNTTGDDY IPTCDCTDAT YFCKHKNRYY PIKVTSHDWY |
| hrv-76 | LVSYSSDIVI YRTNTTGDDY IPTCDCTDAT YFCKHKNRYY PIKVTSHDWY |
| hrv-77 | LVSYSSDLVI YRTNTIGNDY IPTCDCTEAT YYCKHKDRYY PIRVTSHDWY |
| hrv-78 | LIRYSSDLVI YRTNTRGDDY IPTCDCTQCT YYCKSKGRYY PIIVRKHDWY |
| ef173418-78 | LIRYSSDLVI YRTNTRGDDY IPTCDCTQCT YYCKSKGRYY PIIVRKHDWY |
| hrv-80 | LICYSSDLVI YRTNTKGDDV IPVCDCTHAT YYCKHKNRYY PIEVKKHQWY |
| hrv-81 | LVSYSSDLVI YRTNTQGDDY IPTCNCTDAT YYCKHKNRYY PIKVTPHDWY |
| hrv-81-f06 | LVSYSSDLVI YRTNTQGDDY IPTCNCTDAT YYCKHKNRYY PIKVTPHDWY |
| hrv-81-f07 | LVSYSSDLVI YRTNTQGDDY IPTCNCTDAT YYCKHKNRYY PIKVTPHDWY |
| hrv-82 | LVSYSSDLVI YRTNTTGDDY IPTCDCTDAT YYCRHKNRYY PIKVTSHDWY |
| dq473509-82 | LVSYSSDLVI YRTNTTGDDY IPTCDCTDAT YYCRHKNRYY PIKVTSHDWY |
| hrv-85 | LVSYSSDLVI YRTNTIGDDY IPTCDCTEAT YYCKHKNRYY PIRVTSHDWY |
| pico-85 | LVSYSSDLVI YRTNTIGDDY IPTCDCTEAT YYCKHKNRYY PIRVTSHDWY |
| dq473504-88 | LVSYSSDLII YRTNTKGDDV IPNCDCTDCT YYCHHKDRYY PIKVTSHDWY |
| a10937-89 | LVSYSSDLII YRTNTEGNDV IPNCDCTECT YYCHHKDRYF PIRVTAHDWY |
| hrv-89 | LVSYSSDLII YRTNTEGNDV IPNCDCTECT YYCHHKDRYF PIRVTAHDWY |
| hrv-89-f08 | LVSYSSDLVI YRTNTEGNDV IPNCDCTECT YYCHHKDRYF PIKVTAHDWY |
| hrv-89-f09 | LVSYSSDLVI YRTNTEGNDV IPNCDCTECT YYCHHKDRYF PIKVTAHDWY |
| m16248-89 | LVSYSSDLII YRTNTEGNDV IPNCDCTECT YYCHHKDRYF PIRVTAHDWY |
| hrv-90 | LVSYSSDLVI YRTNTTGDDY IPTCDCTEAT YYCKHKNRYY PIRVTSHDWY |
| hrv-94 | LISYSSDLVI YRTNTKGDDY IPTCDCTDAT YYCKHKNRYY PIKVTSHDWY |
| ef173419-94 | LISYSSDLVI YRTNTKGDDY IPTCDCTDAT YYCKHKNRYY PIKVTSHDWY |
| hrv-95 | QVVYTADLVI HRTNDKGDDY IPDCNCTDCC YYCAHKNRYI PVKVKYYNYY |
| hrv-96 | LVSYSSDLVI YRTNTIGDDY IPACDCTQAT YYCKHKNRYY PITVKSHDWY |
| hrv-98 | LVSYSSDLVI YRTNTIGDDY IPTCDCTEAT YYCKHKNRYY PIKVTSHDWY |
| hrv-100 | LVSYSSDLVI YRTNTTGNDY IPTCDCTDAT YYCKHKDRYY PIKVTSHDWY |
| ef186077-qpm | LLAISSDLQV DSTSIPGPDN IPTCDCTTGT YYCKSRDRYY PINLTHHSWY |
| ef077279-nat001 | LLAISSDLQV DSVDTPGPDN IPTCDCTTGT YYCKSRDRYF PINLTHHSWY |
| ny1078 | LLAISSDLQI DSADEPGPDI IPTCDCTTGT YFCKSMDRYY PVEFRHHSWY |
| ef582385-c024 | LLALSADLQV DAADQPGPDT IPQCDCLEGC YYSKSLDRYI PVKLEAHDWY |
| ef077280-nat045 | LLALTADLQI DGCDQPGPDN IPDCDCTSGC YYSRSLDRYI PVECEAHDWY |
| ef582387-c026 | LLAISSDLQV DSTNVPGPDN IPTCDCTTGT YYCKSRDRYY PVNLTHHSWY |
| ef582386-c025 | LIALTADLQV DAAEHPGDDI IPDCDCTTGT YYCKSKDRYY PVSVVSHAWY |
| dq473485-03 | APYPNRDLAV VATGAHGAET IPHCNCTSGV YYSRYYRKFY PIICERPTNI |
| ef173422-03 | APYPNRDLAV VATGAHGAET IPHCNCTSGV YYSRYYRKFY PIICERPTNI |
| dq473490-04 | TPMPERDLAI VDARAHGSET VPQCSCTSGV YYSRYYNKYY PVVCEKPTCV |
| hrv-05 | TPMPERDLAI INIGAHGSET VPHCNCTSGV YFSRYYNNFY PVICEKPTCL |
| dq473486-06 | TPYVNRDLAV VFTGAHGAET IPHCNCTSGV YYSRYYRKFY PVICEKPTTI |
| l05355-14 | APYPNRDLAI VSTGGHGAET IPHCNCTSGV YYSTYYRKYY PIICEKPTNI |
| k02121-14 | APYPNRDLAI VSTGGHGAET IPHCNRTSGV YYSTYYRKYY PIICEKPTNI |
| ef173420-17 | TPYYNRDLAV VATGALGSET IPHCNCTSGV YYSQYYNKYY PIICDKPTNI |
| hrv-26 | TPLPERDLAV VGVGAHGSET VPHCNCTSGV YYSRYYNKFY PIVCEKPTCL |
| hrv-27 | TSLPERDLAV ISINAHGSET VPQCSCTGGV YYSRYYNKYY PVVCEKPTCV |
| ef173421-27 | TSLPERDLAV ISINAHGSET VPQCSCTGGV YYSRYYNKYY PVVCEKPTCV |
| dq473487-35 | APYQSRDLAI VATGAHGAET IPHCNCTSGV YYSTYYRKFY PVICEKPTTI |
| hrv-35 | APYQSRDLAI VATGAHGAET IPHCNCTSGV YYSTYYRKFY PVICEKPTTI |
| ef173423-37 | TPYVNRDLAI VYTGAHGAET IPHCNCTSGV YYSRYYRKFY PIMCEKPTTI |
| hrv-42 | TPLPERDLAI VSTGAHGSET VPQCNCMSGV YYSRYYNKFY PVICEKPTCL |
| dq473488-48 | APHYNRDLAV VATGAQGSEI IPHCNCTSGV YYSQYYGKYY PIICEKPTNI |
| hrv-52 | TPYYNRDLAV VATGAQGSEI IPHCNCTSGV YYSQYYRKYY PIICEKPTNI |
| hrv-52-f10 | TPYYNRDLAV VATGAQGSEI IPHCNCTSGV YYSQYYRKYY PIICDKPTNI |
| ef173424-52 | TPYYNRDLAV VATGAQGSEI IPHCNCTSGV YYSQYYRKYY PIICEKPTNI |
| hrv-69 | TPYYDRDLAV VATGAQGSEI VPHCNCTSGV YYSQYYRKYY PIICERPTNX |
| dq473489-70 | TPYYNRDLAV VATGAQGSET IPHCNCTSGV YYSQYYNKYY PIICDKPTNI |
| hrv-72 | TSYPSRDLAI VSTGAHGAET IPHCNCTSGV YYSSYYRKFY PVICEKPTTI |
| hrv-79 | TSYPSRDLAI VFTGAHGAET VPHCNCTSGV YYSTYYRKSY PIICDKPTTI |
| hrv-83 | SSHPNRDLAV VSTGAHGAET IPHCSCTSGV YYSTYYRKFY PVICERSTTI |
| hrv-84 | TPLPERDLAI INLNGHGSET IPHCNCTSGV YYSRHYNKFY PVICEKPTCI |
| hrv-86 | TPYPSRDLAI VSTGAHGAET IPHCSCTSGV YYSRYYNKFY PIICEKPTNI |
| hrv-91 | TPYYNRDLAV VATGAQGSEI IPHCNCTSGV YYSQYYNKYY PIICDKPTNI |
| hrv-92 | APHPNRDLAV VSTGAHGAET IPHCNCTSGV YYSTYYRKFY PIICGKPTTI |
| ef173425-93 | TPLPERDLAV VNINAHGSET VPHCNCTSGV YYSRYYNKYY PIICEKPTCI |
| hrv-97 | TPLPERDLAV VNINAHGSET VPQCNCTSGV YYSRYYNKYY PVICEKPTCI |
| hrv-99 | TPLPERDLAV VSLQGHGSET VPQCKCTSGV YYSRYYNKFY PVICEKPTCL |
| | 1001 1050 |
| annotation | BB........ BBBB.BBBBB .......C.. BBB....BBB BBBBB...BB |
| af499637-cva13 | WMEKNDFYPA RYQSHMTIGN GFAAPGDCGG ILRCQHGVMG LITAGGNGLV |
| af546702-cva21 | FMEANDYYPA RYQSHMLIGC GFAEPGDCGG ILRCTHGVIG IITAGGEGVV |
| v01149-pv1m | YMEANNYYPA RYQSHMLIGH GFASPGDCGG ILRCHHGVIG IITAGGEGLV |
| d00239-01 | EIQESEYYPK HIQYNLLIGE GPCEPGDCGG KLLCRHGVIG IITAGGEGHV |
| pico-01 | EIQESEYYPK HIQYNLLIGE GPCEPGDCGG KLLCRHGVIG IITAGGEGHV |
| hrv-01 | EIQESEYYPK HIQYNLLIGE GPCEPGDCGG KLLCRHGVIG IITAGGEGHV |
| x02316-02 | EIQESEYYPK HIQYNLLIGE GPCEPGDCGG KLLCKHGVIG IVTAGGDNHV |
| hrv-07 | EIQESEYYPK HIQYNILIGE GPCEPGDCGG KLLCKHGVIG IVTAGGEGHV |
| dq473503-07 | EIQESEYYPK HIQYNILIGE GPCEPGDCGG KLLCKHGVIG IVTAGGEGHV |
| hrv-08 | TIQESEYYPK HIQYDILLGE GPSEPGDCGG KLLCKHGVIG MVTAGGDNHV |
| pico-09 | EIQESEYYPK HIQYNLLIGE GPCEPGDCGG KLLCKHGVIG IITAGGEGHV |
| hrv-09 | EIQESEYYPK HIQYNLLIGE GPCEPGDCGG KLLCKHGVIG IITAGGEGHV |
| hrv-09-f01 | EIQESEYYPK HIQYNLLIGE GPCEPGDCGG KLLCKHGVIG MITAGGEGHV |
| hrv-09-f02 | EIQESEYYPK HIQYNLLIGE GPCEPGDCGG KLLCKHGVIG IITAGGEGHV |
| dq473498-10 | EIQESEYYPK HIQYNLLIGE GPCEPGDCGG KLLCKHGVIG IITAGGEGHV |
| hrv-10 | EIQESEYYPK HIQYNLLIGE GPCEPGDCGG KLLCKHGVIG IITAGGEGHV |
| ef173414-11 | EIQESEYYPK HIQYNLLIGE GPCEPGDCGG KLLCKHGVIG IITAGGEGHV |
| ef173415-12 | EIQESEYYPK HIQYNILIGD GPCQAGDCGG KLLCKHGVIG IVTAGGSGKV |
| hrv-13 | EIQESEYYPK HIQYNLLIGE GPCEPGDCGG KLLCKHGVIG IITAGGEGHV |
| hrv-13-f03 | EIQESEYYPK HIQYNLLIGE GPCEPGDCGG KLLCKHGVIG IITAGGEGHV |
| dq473493-15 | EIQESEYYPK HIQYNLLIGE GPCEPGDCGG KLLCKHGVIG IITAGGEGHV |
| 124917-16 | EIQESEYYPK HIQYNLLIGE GPCEPGDCGG KLLCKHGVIG IITAGGEGHV |
| hrv-18 | EIQESEYYPK HIQYNLLIGE GPCEPGDCGG KLLCKHGVIG IITAGGEGHV |
| hrv-19 | EIQESEYYPK HIQYNLLIGE GPCEPGDCGG KLLCKHGVIG IITAGGEGHV |
| hrv-20 | EIQESEYYPK HIQYNILIGE GPCEPGDCGG KLLCKHGVIG IVTAGGDNHV |
| hrv-21 | EIQESEYYPK HIQYNLLIGE GPCEPGDCGG KLLCKHGVIG MITAGGDGHV |
| hrv-22 | EIQESEYYPK HIQYNLLIGE GPCEPGDCGG KLLCKHGVIG IITAGGEGHV |
| dq473497-23 | EIQESEYYPK HIQYNLLIGE GPCEPGDCGG KLLCKHGVIG IVTAGGDNHV |
| hrv-24 | EIQESEYYPK HIQYNLLIGE GPCEPGDCGG KLLCKHGVIG IVTAGGEGHV |
| ef173416-24 | EIQESEYYPK HIQYNLLIGE GPCEPGDCGG KLLCKHGVIG IVTAGGEGHV |
| hrv-25 | EIQESEYYPK HIQYNLLIGE GPCEPGDCGG KLLCKHGVIG IVTAGGEGHV |
| dq473508-28 | EIQESEYYPK HIQYNILIGE GPCEPGDCGG KLLCKHGVIG IVTAGGENHV |
| hrv-29 | EIQESEYYPK HIQYNLLIGE GPCEPGDCGG KLLCKHGVIG IITAGGEGHV |
| dq473512-30 | EIQESEYYPK HIQYNLLIGE GPCEPGDCGG KLLCKHGVIG IVTAGGDNHV |
| hrv-30 | EIQESEYYPK HIQYNLLIGE GPCEPGDCGG KLLCKHGVIG IVTAGGDNHV |
| hrv-31 | EIQESEYYPK HIQYNLLIGE GPCEPGDCGG KLLCKHGVIG IITAGGEGHV |
| hrv-32 | EIQESEYYPK HIQYNLLIGE GPCEPGDCGG KLLCKHGVIG IITAGGEGHV |
| hrv-33 | EIQESEYYPK HIQYNLLIGE GPCEPGDCGG KLLCKHGVIG IITAGGEGHV |
| hrv-34 | EIQESEYYPK HIQYNLLIGE GPCEPGDCGG KLLCKHGVIG IVTAGGEGHV |
| dq473501-34 | EIQESEYYPK HIQYNLLIGE GPCEPGDCGG KLLCKHGVIG IVTAGGEGHV |
| dq473505-36 | EIQESEYYPK HIQYNLLIGE GPCEPGDCGG KLLCKHGVIG MVTAGGDGHV |
| hrv-38 | EIQESEYYPK HIQYNLLIGE GPCEPGDCGG KLLCKHGVIG IITAGGEGHV |
| dq473495-38 | EIQESEYYPK HIQYNLLIGE GPCEPGDCGG KLLCKHGVIG IITAGGEGHV |
| ay751783-39 | EIQESEYYPK HIQYNLLIGE GPCEPGDCGG KLLCKHGVIG IITAGGDNHV |
| hrv-40 | EIQESEYYPK HIQYNLLIGE GPCEPGDCGG KLLCKHGVIG IITAGGEGHV |
| dq473491-41 | EIQESEYYPK HIQYNLLIGE GPCEPGDCGG KLLCKHGVIG IITAGGEGHV |
| hrv-43 | EIQESEYYPK HIQYNLLIGE GPCEPGDCGG KLLCKHGVIG IITAGGEGHV |
| dq473499-44 | EIQESEYYPK HIQYNLLIGE GPCEPGDCGG KLLCKHGVIG IITAGGEGHV |
| hrv-45 | TIQKSDYYPK HIQYDILIGE GPSQPGDCGG KLLCRHGVIG MVTAGGEGHV |
| dq473506-46 | EIQESDYYPK HIQYNILLGV GPCKPGDCGG KLLCKHGVIG IITAGGDNHV |
| hrv-47 | EIQESEYYPK HIQYNLLIGE GPCEPGDCGG KLLCKHGVIG IITAGGEGHV |
| dq473496-49 | EIQESEYYPK HIQYNLLIGE GPCEPGDCGG KLLCKHGVIG IVTAGGDNHV |
| hrv-49-f04 | EIQESEYYPK HIQYNLLIGE GPCEPGDCGG KLLCKHGVIG IVTAGGDNHV |
| hrv-50 | EIQESEYYPK HIQYNLLIGE GPCEPGDCGG KLLCKHGVIG IVTAGGEGHV |
| hrv-51 | EIQESEYYPK HIQCNILIGE GPCEPGDCGG KLLCKHGVIG LLTAGGSGHV |
| dq473507-53 | EIQESEYYPK HIQYNILLGV GPCKPGDCGG KLLCKHGVIG IITAGGDNHV |
| hrv-54 | EIQESEYYPK HIQYNLLIGE GPCEPGDCGG KLLCKHGVIG IITAGGEGHV |
| hrv-54-f05 | EIQESEYYPK HIQYNLLIGE GPCEPGDCGG KLLCKHGVIG IITAGGEGHV |
| dq473511-55 | EIQESEYYPK HIQYNLLIGE GPCEPGDCGG KLLCRHGVIG MVTAGGDGHV |
| hrv-56 | EIQESEYYPK HIQYNLLIGE GPCEPGDCGG KLLCKHGVIG IITAGGEGHV |
| hrv-57 | EIQESEYYPK HIQYNLLIGE GPCEPGDCGG KLLCKHGVIG MITAGGEGHV |
| hrv-58 | EIQESEYYPK HIQYNLLIGE GPCEPGDCGG KLLCKHGVIG IVTAGGDGHV |
| dq473500-59 | EIQESEYYPK HIQYNLLIGE GPCEPGDCGG KLLCKHGVIG IITAGGEGHV |
| hrv-60 | EIQESEYYPK HIQYNLLIGE GPCEPGDCGG KLLCKHGVIG IITAGGEGHV |
| hrv-61 | EIQESEYYPK HIQYNLLIGE GPCEPGDCGG KLLCKHGVIG IITAGGEGHV |
| hrv-62 | EIQESEYYPK HIQYNLLIGE GPCEPGDCGG KLLCKHGVIG IVTAGGEGHV |
| hrv-63 | EIQESEYYPK HIQYNLLIGE GPCEPGDCGG KLLCKHGVIG IITAGGEGHV |
| hrv-64 | EIQESEYYPK HIQYNLLIGE GPCEPGDCGG KLLCKHGVIG IITAGGEGHV |
| ef173417-64 | EIQESEYYPK HIQYNLLIGE GPCEPGDCGG KLLCKHGVIG IITAGGEGHV |
| hrv-65 | EIQESEYYPK HIQYNILIGE GPCKPGDCGG KLLCKHGVIG ILTAGGEGHV |
| hrv-66 | EIQESEYYPK HIQYNLLIGE GPCEPGDCGG KLLCKHGVIG IITAGGEGHV |
| hrv-67 | EIQESEYYPK HIQYNLLIGE GPCEPGDCGG KLLCKHGVIG IITAGGEGHV |
| hrv-68 | EIQESEYYPK HIQYNILMGE GPCEPGDCGG KLLCKHGVIG IVTAGGDNHV |
| hrv-71 | EIQESEYYPK HVQYNILIGE GPCEPGDCGG KLLCSHGVIG IVTAGGEGHV |
| dq473492-73 | EIQESEYYPK HIQYNLLIGE GPCEPGDCGG KLLCKHGVIG IITAGGEGHV |
| dq473494-74 | EIQESEYYPK HIQYNLLIGE GPCEPGDCGG KLLCKHGVIG IVTAGGEGHV |
| dq473510-75 | EIQESEYYPK HIQYNLLIGE GPCEPGDCGG KLLCRHGVIG IVTAGGEGHV |
| dq473502-76 | EIQESEYYPK HIQYNLLIGE GPCEPGDCGG KLLCKHGVIG IITAGGEGHV |
| hrv-76 | EIQESEYYPK HIQYNLLIGE GPCEPGDCGG KLLCKHGVIG IITAGGEGHV |
| hrv-77 | EIQESEYYPK HIQYNLLIGE GPCEPGDCGG KLLCKHGVIG IVTAGGEGHV |
| hrv-78 | EIQESEYYPK HIQYNILIGE GPCEPGDCGG KLLCKHGVIG IVTAGGEGHV |
| ef173418-78 | EIQESEYYPK HIQYNILIGE GPCEPGDCGG KLLCKHGVIG IVTAGGEGHV |
| hrv-80 | EIQESEYYPK HIQYNILIGV GPCEPGDCGG KLLCKHGVIG IVTAGGDDHV |
| hrv-81 | EIQESEYYPK HIQYNLLIGE GPCEPGDCGG KLLCKHGVIG IITAGGEGHV |
| hrv-81-f06 | EIQESEYYPK HIQYNLLIGE GPCEPGDCGG KLLCKHGVIG IITAGGEGHV |
| hrv-81-f07 | EIQESEYYPK HIQYNLLIGE GPCEPGDCGG KLLCKHGVIG IITAGGEGHV |
| hrv-82 | EIQESEYYPK HIQYNLLIGE GPCEPGDCGG KLLCKHGVIG IITAGGEGHV |
| dq473509-82 | EIQESEYYPK HIQYNLLIGE GPCEPGDCGG KLLCKHGVIG IITAGGEGHV |
| hrv-85 | EIQESEYYPK HIQYNLLIGE GPCEPGDCGG KLLCKHGVIG IITAGGEGHV |
| pico-85 | EIQESEYYPK HIQYNLLIGE GPCEPGDCGG KLLCKHGVIG IITAGGEGHV |
| dq473504-88 | EIQESEYYPK HIQYNILIGE GPCEPGDCGG KLLCKHGVIG IVTAGGEGHV |
| a10937-89 | EIQESEYYPK HIQYNLLIGE GPCEPGDCGG KLLCKHGVIG MITAGGEGHV |
| hrv-89 | EIQESEYYPK HIQYNLLIGE GPCEPGDCGG KLLCKHGVIG MITAGGEGHV |
| hrv-89-f08 | EIQESEYYPK HIQYNLLIGE GPCEPGDCGG KLLCKHGVIG MVTAGGEGHV |
| hrv-89-f09 | EIQESEYYPK HIQYNLLIGE GPCEPGDCGG KLLCKHGVIG MVTAGGEGHV |
| m16248-89 | EIQESEYYPK HIQYNLLIGE GPCEPGDCGG KLLCKHGVIG MITAGGEGHV |
| hrv-90 | EIQESEYYPK HIQYNLLIGE GPCEPGDCGG KLLCKHGVIG IITAGGEGHV |
| hrv-94 | EIQESEYYPK HIQYNLLIGE GPCKPGDCGG KLLCKHGVIG IITAGGEGHV |
| ef173419-94 | EIQESEYYPK HIQYNLLIGE GPCKPGDCGG KLLCKHGVIG IITAGGEGHV |
| hrv-95 | TIQESEYYPK HIQYDILLGE GPSEPGDCGG KLLCKHGVIG MVTAGGDNHV |
| hrv-96 | EIQESEYYPK HIQYNLLIGE GPCEPGDCGG KLLCKHGVIG IITAGGEGHV |
| hrv-98 | EIQESEYYPK HIQYNLLIGE GPCEPGDCGG KLLCKHGVIG IITAGGEGHV |
| hrv-100 | EIQESEYYPK HIQYNLLIGE GPCEPGDCGG KLLCKHGVIG IITAGGEGHV |
| ef186077-qpm | IIQESSYYPK HIQYDILIGE GPCSPGDCGG KLLCTHGTIG MVTAGGENHV |
| ef077279-nat001 | IIQESDYYPK HIQYDILIGE GPCSPGDCGG KLLCVHGTIG MVTAGGENHV |
| ny1078 | EIQESIYYPK HIQYDILIGE GPCSPGDCGG KLLCVHGTIG MITAGGENHV |
| ef582385-c024 | QIEETCYYPQ HIQYNIMIGE GHCQPGDCGG KLLCTHGVIG IITAGGDNHV |
| ef077280-nat045 | PVEETQYYPK HIQYNLLIGE GPCVPGDCGG KLLCRHGVIG IITAGGDGHV |
| ef582387-c026 | IIQESSYYPK HIQYDILIGE GPCSPGDCGG KLLCIHGTIG MVTAGGENHV |
| ef582386-c025 | PIEESSYYPK HVQYNILLGE GPCEPGDCGG KLLCKHGVIG IVTAGGEGHV |
| dq473485-03 | WIEGSSYYPS RYQAGVMKGV GPAEPGDCGG ILRCIHGPIG LLTAGGGGYV |
| ef173422-03 | WIEGSSYYPS RYQAGVMKGV GPAEPGDCGG ILRCIHGPIG LLTAGGGGYV |
| dq473490-04 | WIEGNNYYPS RYQQGVMKGV GPAEPGDCGG ILRCVHGPIG LLTAGGSGFV |
| hrv-05 | WIEGNNYYPS RYQQGVMRGV GPAEPGDCGG ILRCVHGPIG LLTAGGSGYV |
| dq473486-06 | WIEGSSYYPS RYQTGVMKGV GPAEPGDCGG ILRCVHGPIG LLTAGGSGYV |
| l05355-14 | WIEGNPYYPS RFQAGVMKGV GPAEPGDCGG ILRCIHGPIG LLTAGGSGYV |
| k02121-14 | WIEGSPYYPS RFQAGVMKGV GPAELGDCGG ILRCIHGPIG LLTAEGSGYV |
| ef173420-17 | WIEGGNYYPS RFQSGVMKGV GPAEPGDCGG VLRCVHGPIG LLTAGGSGYV |
| hrv-26 | WIEGNNYYPS RYQQGVMRGV GPAEPGDCGG ILRCIHGPIG LLTAGGSGYV |
| hrv-27 | WIEGNNYYPS RYQQGVMKGV GPAEPGDCGG ILRCIHGPIG ILTAGGGGYV |
| ef173421-27 | WIEGNNYYPS RYQQGVMKGV GPAEPGDCGG ILRCIHGPIG ILTAGGGGYV |
| dq473487-35 | WIEGGPYYPS RYQVGVMKGV GPAEPGDCGG ILRCIHGPIG LLTAGGGGYV |
| hrv-35 | WIEGGPYYPS RYQVGVMKGV GPAEPGDCGG ILRCIHGPIG LLTAGGGGYV |
| ef173423-37 | WIEGSSYYPS RYQSGVMKGV GPAEPGDCGG ILRCVHGPIG LLTAGGSGYV |
| hrv-42 | WIEGNNYYPS RYQQGVMRGV GPAEPGDCGG ILRCIHGPIG LLTAGGSGYV |
| dq473488-48 | WIEGGNYYPS RYQAGVMKGV GPAEPGDCGG ILRCIHGPIG LLTAGGSGYV |
| hrv-52 | WIEGGSYYPS RFQSGVMKGV GPAEPGDCGG ILRCMHGPIG LLTAGGSGYV |
| hrv-52-f10 | WIEGGSYYPS RFQSGVMKGV GPAEPGDCGG ILRCVHGPIG LLTAGGSGYV |
| ef173424-52 | WIEGGSYYPS RFQSGVMKGV GPAEPGDCGG ILRCMHGPIG LLTAGGSGYV |
| hrv-69 | WIEGGNYYPS RFQSGVMKGI GPAEPGDCGG ILRCIHGPIG LLTAGGSGYV |
| dq473489-70 | WIEGGNYYPS RFQSGVMKGV GPAEPGDCGG ILRCVHGPIG LLTAGGSGYV |
| hrv-72 | WIEGGPYYPS RFQTGVMKGV GPAEPGDCGG ILRCVHGPIG LLTAGGSGYV |
| hrv-79 | WIEGGPYYPS RYQVGVMKGV GPAEPGDCGG ILRCVHGPIG LLTAGGSGYV |
| hrv-83 | WIEGGPYYPS RYQAGVMKGV GPAEPGDCGG ILRCVHGPIG LLTAGGGGYV |
| hrv-84 | WIEGNNYYPS RYQQGVMKGV GPAEPGDCGG ILRCVHGPIG LLTAGGGGFV |
| hrv-86 | WIEGGPYYPS RYQSGVMKGV GPAEPGDCGG ILRCIHGPIG LLTAGGSGFV |
| hrv-91 | WIEGGNYYPS RFQSGVMKGV GPAEPGDCGG ILRCVHGPIG LLTAGGSGYV |
| hrv-92 | WIEGGPYYPS RYQVGVMKGV GPAEPGDCGG ILRCVHGPIG LLTAGGSGYV |
| ef173425-93 | WIEGSNYYPS RYQQGVMKGV GPAEPGDCGG ILRCTHGPIG ILTAGGGGYV |
| hrv-97 | WIEGNSYYPS RYQQGVMKGV GPAEPGDCGG ILRCVHGPIG LLTAGGGGFV |
| hrv-99 | WIEGNNHYPS RYQQGVMKGM GPAEPGDCGG ILRCTHGPIG LLTAGGSGYV |
| | 1051 1100 |
| annotation | BBBBHHHH.. ......EQG. .......... .......... .......... |
| af499637-cva13 | AFADIRDLY. VEEEAMEQG. ITSYIESLGA AFGSGFTTQI SDKITELTSM |
| af546702-cva21 | AFADIRDLWV YEEEAMEQG. ITSYIESLGT AFGAGFTHTI SEKVTELTTM |
| v01149-pv1m | AFSDIRDLYA YEEEAMEQG. ITNYIESLGA AFGSGFTQQI SDKITELTNM |
| d00239-01 | AFTDLRQF.. ..QCAEEQG. ITDYIHMLGE AFGNGFVDSV KEQINAINPI |
| pico-01 | AFIDLRQF.. ..HCAEEQG. ITDYIHMLGE AFGNGFVDSV KEQINAINPI |
| hrv-01 | AFIDLRQF.. ..HCAEEQG. ITDYIHMLGE AFGNGFVDSV KEQINAINPI |
| x02316-02 | AFIDLRHF.. ..HCAEEQG. VTDYIHMLGE AFGNGFVDSV KEHIHAINPV |
| hrv-07 | AFIDLRKF.. ..QCAEEQG. ISDYVEHLGQ VFGVGFVDSI KQQVNFINPT |
| dq473503-07 | AFIDLRKF.. ..QCAEEQG. ISDYVEHLGQ VFGVGFVDSI KQQVNFINPT |
| hrv-08 | AFIDLRKYR. .ITEAEEQG. ITDYVKSLGD AFGVGFVEQI KEQVSNINPL |
| pico-09 | AFIDLRHF.. ..HCAEEQG. ITDYIHMLGE AFGNGFVDSV RDQVNAINPI |
| hrv-09 | AFIDLRHF.. ..HCAEEQG. ITDYIHMLGE AFGNGFVDSV RDQVNAINPI |
| hrv-09-f01 | AFIDLRHF.. ..HCAEEQG. ITDYIHMLGE AFGNGFVDSV REQVNAINPI |
| hrv-09-f02 | AFIDLRHF.. ..HCAEEQG. ITDYIHMLGE AFGNGFVDSV REQVNAINPI |
| dq473498-10 | AFIDLRQF.. ..HCADEQG. ITDYIHMLGE AFGTGFVDSV KEQINAINPI |
| hrv-10 | AFIDLRQF.. ..HCADEQG. ITDYIHMLGE AFGTGFVDSV KEQINAINPI |
| ef173414-11 | AFIDLRHF.. ..HCAEEQG. ITDYIHMLGE AFGSGFVDSV KDQINAINPI |
| ef173415-12 | AFIDLRDF.. ..HVADEQG. ISDYITNLGE AFGQGFMSQV KDQISELNPM |
| hrv-13 | AFIDLRHF.. ..LCAEEQG. VTDYIHMLGE AFGNGFVDSV KEHVNAINPI |
| hrv-13-f03 | AFIDLRHF.. ..LCAEEQG. VTDYIHMLGE AFGNGFVDSV KEHVNAINPI |
| dq473493-15 | AFIDLRHF.. ..HCAEEQG. VTDYIHMLGE AFGDGFVNSV KEQISAINPV |
| l24917-16 | AFIDLRHF.. ..HCAEEQG. ITDYIHMLGE AFGSGFVDSV KDQINSINPI |
| hrv-18 | AFIDLRHF.. ..QCAEEQG. ITDYIHMLGE AFGTGFVDSV KDQINAINPI |
| hrv-19 | AFIDLRHF.. ..HCAEEQG. ITDYIHMLGE AFGNGFVDSV RDQVNAINPI |
| hrv-20 | AFIDLRDF.. ..QVAEEQG. ISDYVHTLGE AFGAGFVDNI KEQIQAINPI |
| hrv-21 | AFIDLRHF.. ..HCAEEQG. ITDYIHMLGE AFGSGFVDSV KEQINAINPI |
| hrv-22 | AFIDLRHF.. ..HCAEEQG. ITDYIHMLGE AFGNGFVDSV REQVNAINPI |
| dq473497-23 | AFIDLRQF.. ..HCADEQG. ITDYIHMLGE AFGNGFVDSV KEHVHAINPI |
| hrv-24 | AFIDLRHF.. ..HCADEQG. ITDYIHMLGE AFGNGFVDSV KDQINAINPI |
| ef173416-24 | AFIDLRHF.. ..HCADEQG. ITDYIHMLGE AFGNGFVDSV KDQINAINPI |
| hrv-25 | AFIDLRQF.. ..HCADEQG. VTDYIHMLGE AFGAGFVDSV KEQINAINPI |
| dq473508-28 | AFIDLRDF.. ..LVAEEQG. VLDYVHTLGE AFGAGFVDNI KEQIQTINPI |
| hrv-29 | AFIDLRQF.. ..HCADEQG. ITDYIHMLGE AFGTGFVDSV KEQINAINPI |
| dq473512-30 | AFIDLRHF.. ..HCAEEQG. ITDYIHMLGE AFGNGFVDSV KEHVQAINPI |
| hrv-30 | AFIDLRHF.. ..HCAEEQG. ITDYIHMLGE AFGNGFVDSV KEHVQAINPI |
| hrv-31 | AFIDLRQF.. ..HCADEQG. ITDYIHMLGE AFGSGFVDSV KDQINAINPI |
| hrv-32 | AFIDLRHF.. ..HCAEEQG. ITDYVHMLGE AFGNGFVDSV RDQVNAINPI |
| hrv-33 | AFIDLRHF.. ..HCAEEQG. ITDYIHMLGE AFGSGFVDSV KDQINAINPI |
| hrv-34 | AFIDLRHF.. ..HCAEEQG. ITDYVHMLGE AFGLGFVDSV KDQINAINPI |
| dq473501-34 | AFIDLRHF.. ..HCAEEQG. ITDYVHMLGE AFGLGFVDSV KDQINAINPI |
| dq473505-36 | AFIDLRKF.. ..QCAEEQG. LSDYVEHLGQ VFGVGFVDSI KQQVNFINPT |
| hrv-38 | AFIDLRHF.. ..HCAEEQG. ITDYIHMLGE AFGNGFVDSV KEQVNAINPI |
| dq473495-38 | AFIDLRHF.. ..HCAEEQG. ITDYIHMLGE AFGNGFVDSV KEQVNAINPI |
| ay751783-39 | AFIDLRHF.. ..HCAEEQG. VTDYIHMLGE AFGNGFVDSV KEHVKAINPV |
| hrv-40 | AFIDLRHF.. ..HCAEEQG. ITDYIHMLGE AFGTGFVDSV KDQISAINPI |
| dq473491-41 | AFIDLRHF.. ..LCAEEQG. VTDYIHMLGE AFGNGFVDSV KEHVNAINPI |
| hrv-43 | AFIDLRHF.. ..HCAEEQG. ITDYIHLLGE AFGNGFVESV KEQVNAINPI |
| dq473499-44 | AFIDLRQF.. ..HCADEQG. ITDYIHMLGE AFGTGFVDSV KEQINAINPI |
| hrv-45 | AFTDLRKYR. .MVEAEEQG. ITDYVKSLGD AFGVGFVDQI KEQINNINPL |
| dq473506-46 | AFIDLRDF.. ..QIAEEQG. IPEYIHSLGE AFGSGFVDNI KDQIQSINPI |
| hrv-47 | AFIDLRQF.. ..HCADEQG. ITDYIHMLGE AFGSGFVDSV KDQINAINPI |
| dq473496-49 | AFIDLRHF.. ..HCAEEQG. ITDYIHMLGE AFGNGFVDSV KEHIHAINPV |
| hrv-49-f04 | AFIDLRHF.. ..HCAEEQG. VTDYIHMLGE AFGNGFVDSV KEHIHAINPV |
| hrv-50 | AFIDLRHF.. ..HCAEEQG. ITDYVHMLGE AFGLGFVDSV KDQINAINPI |
| hrv-51 | AFIDLRDF.. ..HVADTQG. ITDYVHNLGE AFGAGFIDNI REQIQVINPI |
| dq473507-53 | AFIDLRDF.. ..QVAEEQG. IPEYIHSLGE AFGSGFVDNI KDQIQTINPI |
| hrv-54 | AFIDLRHF.. ..HCAEEQG. ITDYIHMLGE AFGTGFVDSV KDQINAINPI |
| hrv-54-f05 | AFIDLRHF.. ..HCAEEQG. ITDYIHMLGE AFGTGFVDSV KDQINAINPI |
| dq473511-55 | AFIDLRHF.. ..HCAEEQG. ITDYIHMLGE AFGSGFVDSV KDQINAINPI |
| hrv-56 | AFIDLRHF.. ..HCAEEQG. ITDYIHMLGE AFGTGFVDSV KDQISAINPI |
| hrv-57 | AFIDLRHF.. ..HCAEEQG. ITDYIHMLGE AFGNGFVDSV KEQINAINPI |
| hrv-58 | AFIDLRKF.. ..QCAEEQG. LSDYVEHLGQ VFGVGFVDSI KEQVNFINPT |
| dq473500-59 | AFIDLRHF.. ..HCAEEQG. ITDYIHMLGE AFGTGFVDSV KEQISAINPV |
| hrv-60 | AFIDLRHF.. ..HCAEEQG. ITDYIHMLGE AFGNGFVDSV RDQVNAINPI |
| hrv-61 | AFIDLRHF.. ..LCAEEQG. VTDYIHMLGE AFGNGFVDSV KEHVNAINPV |
| hrv-62 | AFIDLRQF.. ..HCVDEQG. VTDYIHMLGE AFGAGFVDSV KEQINAINPI |
| hrv-63 | AFIDLRQF.. ..HCAEEQG. VTDYIHMLGE AFGTGFVDSV KEQINAINPI |
| hrv-64 | AFIDLRHF.. ..HCAEEQG. ITDYIHMLGE AFGNGFVDSV REQVNAINPI |
| ef173417-64 | AFIDLRHF.. ..HCAEEQG. ITDYIHMLGE AFGNGFVDSV REQVNAINPI |
| hrv-65 | AFIDLRDF.. ..HVADTQG. ITDYVHNLGE AFGAGFIDNI KEQIQVINPI |
| hrv-66 | AFIDLRHF.. ..HCAEEQG. ITDYIHTLGE AFGTGFVDSV KDQINAINPI |
| hrv-67 | AFIDLRHF.. ..HYAEEQG. ITDYIHMLGE AFGNGFVDSV KEQVNAINPI |
| hrv-68 | AFIDLRDF.. ..QVAEEQG. ISDYVHTLGE AFGAGFVDNI REQIQTINPI |
| hrv-71 | AFIDLRDF.. ..HVAETQG. ITDYIHNLGE AFGAGFIDNI KDQINVINPI |
| dq473492-73 | AFIDLRHF.. ..LCAEEQG. VTDYIHMLGE AFGNGFVDSV KEHVNAINPI |
| dq473494-74 | AFIDLRHF.. ..HCAEEQG. ITDYIHMLGE AFGNGFVDSV REQVNAINPI |
| dq473510-75 | AFIDLRQF.. ..HCAEEQG. ITDYIHMLGE AFGNGFVESV KEQVSAINPI |
| dq473502-76 | AFIDLRHF.. ..HCAEEQG. ITDYIHMLGE AFGSGFVDSV KDQINAINPI |
| hrv-76 | AFIDLRHF.. ..HCAEEQG. ITDYIHMLGE AFGSGFVDSV KDQINAINPI |
| hrv-77 | AFIDLRHF.. ..HCAEEQG. ITDYIHMLGE AFGTGFVDSV KDQINAINPI |
| hrv-78 | AFIDIRDF.. ..QCAEEQG. ISDYMQYLGE AFGTGFVDSV REHVQSINPI |
| ef173418-78 | AFIDIRDF.. ..QCAEEQG. ISDYMQYLGE AFGTGFVDSV REHVQSINPI |
| hrv-80 | AFIDLRDF.. ..HCAENQG. ISDYIHSLGE AFGAGFIDNI KDQIQTINPM |
| hrv-81 | AFIDLRHF.. ..HCAEEQG. ITDYIHMLGE AFGSGFVDSV KDQINSINPI |
| hrv-81-f06 | AFIDLRHF.. ..HCAEEQG. ITDYIHMLGE AFGSGFVDSV KEQINSINPI |
| hrv-81-f07 | AFIDLRHF.. ..HCAEEQG. ITDYIHMLGE AFGSGFVDSV KEQINSINPI |
| hrv-82 | AFIDLRHF.. ..HCAEEQG. ITDYIHMLGE AFGSGFVDSV KDQINAINPI |
| dq473509-82 | AFIDLRHF.. ..HCAEEQG. ITDYIHMLGE AFGSGFVDSV KDQINAINPI |
| hrv-85 | AFIDLRHF.. ..HCAEEQG. ITDYIHMLGE AFGTGFVDSV KEQISAINPI |
| pico-85 | AFIDLRHF.. ..HCAEEQG. ITDYIHMLGE AFGTGFVDSV KEQISAINPI |
| dq473504-88 | AFIDLRKF.. ..QCAEEQG. ISDYVEHLGQ VFGVGFVDSI KQQINFINPT |
| a10937-89 | AFIDLRKF.. ..QCAEEQG. LSDYVEHLGQ VFGVGFVDSI KQQVNFINPT |
| hrv-89 | AFIDLRKF.. ..QCAEEQG. LSDYVEHLGQ VFGVGFVDSI KQQVNFINPT |
| hrv-89-f08 | AFIDLRKF.. ..QCAEEQG. LSDYVEHLGQ VFGVGFVDSI KQQVNFINPT |
| hrv-89-f09 | AFIDLRKF.. ..QCAEEQG. LSDYVEHLGQ VFGVGFVDSI KQQVNFINPT |
| m16248-89 | AFIDLRKF.. ..QCAEEQG. LSDYVEHLGQ VFGVGFVDSI KQQVNFINPT |
| hrv-90 | AFIDLRHF.. ..HCAEEQG. ITDYIHMLGE AFGSGFVDSV KDQINAINPI |
| hrv-94 | AFIDLRHF.. ..HCAEEQG. ITDYIHMLGE AFGNGFVDSV REQVNAINPI |
| ef173419-94 | AFIDLRHF.. ..HCAEEQG. ITDYIHMLGE AFGNGFVDSV REQVNAINPI |
| hrv-95 | AFIDLRKYR. .ITEAEEQG. ITDYVKSLGD AFGVGFVEQI KEQVSNINPL |
| hrv-96 | AFIDLRHF.. ..LCAEEQG. VTDYIHMLGE AFGNGFVDSV KEHVNAINPV |
| hrv-98 | AFIDLRHF.. ..HCAEEQG. ITDYIHMLGE AFGTGFVDSV KDQINAINPI |
| hrv-100 | AFIDLRQF.. ..HCVEEQG. VTDYVHMLGE AFGMGFVDSV KDQINAINPI |
| ef186077-qpm | AFIDLRNY.. .SSLSEHQG. ITDYVTQLGN AFGDGFTSSI RETLVSACDV |
| ef077279-nat001 | AFIDLRNY.. .SSLSEHQG. ITDYVTQLGS AFGDGFTNSI RDTLVGACDV |
| ny1078 | AFIDLRNY.. .SSLSEHQG. VTDYITQLGS AFGDGFTSSI RQTLMGACDV |
| ef582385-c024 | AFTDLRPY.. .SCLDTHQGP IQDYVTQLGS AFGSGFTDTL KDQLTDVSAH |
| ef077280-nat045 | AFTDLRPY.. .NIKATSQGP VTNYLNQLGS AFGEGFTANI KDQLATVGNT |
| ef582387-c026 | AFIDLRNY.. .SSLSEHQG. ITDYVTQLGN AFGDGFTNSI RETLVSACDV |
| ef582386-c025 | AFTDLRPY.. .SSLAHTQGP ISDYITQLGN AFGTGFTQTL ETNLKETCSG |
| dq473485-03 | CFADIRQLD. ..FIADEQG. LGDYITSLGR AFGTGFTDQI SAKVCELQDV |
| ef173422-03 | CFADIRQLD. ..FIADEQG. LGDYITSLGR AFGTGFTDQI SAKVCELQDV |
| dq473490-04 | CFADIRMLE. .LFKAEYQG. ISDYIVNLGK AFGTGFTDHI SEKVAELQNI |
| hrv-05 | CFADIRALD. .LFKAEYQG. ISDYILNLGK AFGSGFTEHI SEKVTELQNI |
| dq473486-06 | CFADIRQLD. ..CIAEEQG. LNDYITNLGR AFGVGFTDQI SAKVTELQDV |
| l05355-14 | CFADIRQLE. ..CIAEEQG. LSDYITGLGR AFGVGFTDQI STKVTELQEV |
| k02121-14 | CFADIRQLE. ..CIAEEQG. LSDYITGLGR AFGVGFTDQI STKVTELQEV |
| ef173420-17 | CFADIRQLD. ..FIAETQG. ITDYITSLGK AFGVGFTDQI SAKITELQDS |
| hrv-26 | CFADIRTLD. .MFNAEYQG. ISDYILNLGK AFGTGFTEHI SEKVTELQNI |
| hrv-27 | CFADIRGLD. .MFQAEYQG. ISDYILNLGK AFGTGFTDHI SEKVSELQNI |
| ef173421-27 | CFADIRGLD. .MFQAEYQG. ISDYILNLGK AFGTGFTDHI SEKVSELQNI |
| dq473487-35 | CFADIRQLE. ..NVAEEQG. LGDYITSLGR AFGVGFTDQI SAKVVELQDV |
| hrv-35 | CFADIRQLE. ..NVAEEQG. LGDYITSLGR AFGVGFTDQI SAKVVELQDV |
| ef173423-37 | CFADIRQLD. ..CIAEEQG. LNDYITSLGR AFGVGFTDQI SAKVTELQDV |
| hrv-42 | CFADIRALD. .MFKAEYQG. ISDYISNLGK AFGTGFTEHI SEKVTELQNM |
| dq473488-48 | CFADIRQLD. ..FIAETQG. ITDYITSLGK AFGVGFTDQI SAKITELQDS |
| hrv-52 | CFADIRQLD. ..FIAETQG. ITDYITNLGK AFGVGFTDQI SAKVTELQDS |
| hrv-52-f10 | CFADIRQLD. ..FIAETQG. ITDYITNLGK AFGVGFTDQI SAKVTELQDS |
| ef173424-52 | CFADIRQLD. ..FIAETQG. ITDYITNLGK AFGVGFTDQI SAKVTELQDS |
| hrv-69 | CFADIRQLD. ..FIAETQG. ITDYITNLGK AFGVGFTDQI SAKVTELQDS |
| dq473489-70 | CFADIRQLD. ..FIAETQG. ITDYITSLGK AFGVGFTDQI SAKVTELQDS |
| hrv-72 | CFADIRQLE. ..CIAEEQG. ISDYITSLGR AFGVGFTDQI SAKVTELQDV |
| hrv-79 | CFADIRQLE. ..QIAEEQG. LGDYITSLGR AFGVGFTDQI SAKVTELQDV |
| hrv-83 | CFADIRQLE. ..CIAEEQG. LGDYITSLGR AFGVGFTDQI SAKVTELQDV |
| hrv-84 | CFADIRMLD. .MLHAHYQG. IPDYITNLGR AFGTGFTDHI NDKIAELQST |
| hrv-86 | CFADIRELE. ..CIAEEQG. ISDYISNLGK AFGAGFTDQI TSKIGELQDT |
| hrv-91 | CFADIRQLD. ..LIAETQG. ITDYITSLGK AFGVGFTDQI SAKVSELQDS |
| hrv-92 | CFADIRQLD. ..CIAEEQG. LGDYITSLGR AFGVGFTDQI SAKVTELQDV |
| ef173425-93 | CFADIRGLD. .MFHAEYQG. ISDYILNLGK AFGTGFTDHI SEKVSELQNI |
| hrv-97 | CFADIRGLD. .MFRAEYQG. ISDYILNLGK AFGTGFTDHI SEKVSELQNI |
| hrv-99 | CFADIRALD. .MFEAEYQG. ISDYILNLGK AFGTGFTEHI SEKVTELQNI |
| | 1101 1150 |
| annotation | .......... .......... .......... .......... .......... |
| af499637-cva13 | VTSVLTEKLL KNLIKLISSL VIITRNYEDT TTVLATLALL GCDVSPWAWL |
| af546702-cva21 | VTSTITEKLL KNLVKIVSAL VIVVRNYEDT TTILATLALL GCDISPWQWL |
| v01149-pv1m | VTSTITEKLL KNLIKIISSL VIITRNYEDT TTVLATLALL GCDASPWQWL |
| d00239-01 | NN..ISKKVI KWLLRIISAM VIIIRNSSDP QTIIATLTLI GCNGSPWRFL |
| pico-01 | NN..ISKKVI KWLLRIISAM VIIIRNSSDP QTIIATLTLI GCNGSPWRFL |
| hrv-01 | NN..ISKKVI KWLLRIISAM VIIIRNSSDP QTIIATLTLI GCNGSPWRFL |
| x02316-02 | GN..ISKKII KWMLRIISAM VIIIRNSSDP QTILATLTLI GCSGSPWRFL |
| hrv-07 | SK..IGSKVI KWLLRIVSAM IIMVRNSSDP QTIVATLTLL GCSGSPWRFL |
| dq473503-07 | SK..IGSKVI KWLLRIVSAM IIMVRNSSDP QTIVATLTLL GCSGSPWRFL |
| hrv-08 | NN..ISAKVI KWLIRVISAL VIAVRSQGDL ATLSATLVLL GCSDSPWRFL |
| pico-09 | NS..ISKKIV KWMLRIISAM VIIIRNSSDP QTIIATLTLI GCSGSPWRFL |
| hrv-09 | NN..ISKKIV KWMLRIISAM VIIIRNSSDP QTIIATLTLI GCSGSPWRFL |
| hrv-09-f01 | NN..ISKKII KWMLRIISAM VIIIRNSSDP QTIIATLTLI GCSGSPWRFL |
| hrv-09-f02 | NN..ISKKII KWMLRIISAM VIIIRNSSDP QTIIATLTLI GCSGSPWRFL |
| dq473498-10 | NN..ISKKII KWLLRIISAM VIIIRNSSDP QTIIATLTLI GCSGSPWRFL |
| hrv-10 | NN..ISKKII KWLLRIISAM VIIIRNSSDP QTIIATLTLI GCSGSPWRFL |
| ef173414-11 | NN..ISRKIV KWILRIISAM VVIIRNSSDP QTIIATLTLL GCSGSPWRFL |
| ef173415-12 | NK..ITGKVL KWTIRIISAL TIVVRNSSDP LTIVATLAML GCNGSPWRFL |
| hrv-13 | NN..ISKKVI KWLLRIVSAM VIIIRNSSDP HTVVATLTLI GCSGSPWRFL |
| hrv-13-f03 | NN..ISKKVI KWLLRIVSAM VIIIRNSSDP HTVVATLTLI GCSGSPWRFL |
| dq473493-15 | NN..ISKKIV KWMLRIISAM VIIIRNSSDP QTVIATLTLI GCSGSPWRFL |
| l24917-16 | NN..ISSKMV KWMLRIISAM VIIIRNSSDP QTIIATLTLI GCNGSPWRFL |
| hrv-18 | NN..ISKKII KWLLRIISAM VIIIRNSSDP QTIIATLTLI GCSGSPWRFL |
| hrv-19 | NN..ISKKLI KWMLRIISAM VIIIRNSSDP QTIVATLTLV GCSGSPWRFL |
| hrv-20 | NK..ITSKII KWTIRIVSAI TIIIRNNADP HTIIATLALL GCSGSPWRFI |
| hrv-21 | NN..ISKKII KWLLRIISAM VIIIRNSSDP QTIIATLTLI GCSGSPWRFL |
| hrv-22 | NN..ISKKLV KWLLRIVSAM VIIIRNSSDP QTVIATLTLI GCSGSPWRFL |
| dq473497-23 | GN..ISKKIV KWMLRIISAM VIIIRNSSDP QTILATLTLI GCSGSPWRFL |
| hrv-24 | NS..ISKKII KWLLRIISAM VIIIRNSSDP QTIVATLTLI GCSGSPWRFL |
| ef173416-24 | NS..ISKKII KWLLRIISAM VIIIRNSSDP QTIVATLTLI GCSGSPWRFL |
| hrv-25 | NN..ISKKII KWLLRIISAM VIIIRNSSDP QTIIATLTLI GCSGSPWRFL |
| dq473508-28 | NK..ITSKII KWTIRIISAI TIIIRNNADP HTIIATLALL GCSGSPWRFI |
| hrv-29 | NN..ISKKII KWLLRVISAM VIIIRNSSDP QTIIATLTLI GCSGSPWRFL |
| dq473512-30 | GN..ISKKII KWMLRVISAM VIIIKNSSDP QTILATLTLI GCSGSPWRFL |
| hrv-30 | GN..ISKKII KWMLRVISAM VIIIRNSSDP QTILATLTLI GCSGSPWRFL |
| hrv-31 | NN..ISKKII KWLLRIISAM VIIIRNSSDP QTIVATLTLI GCSGSPWRFL |
| hrv-32 | NS..ISKKII KWMLRIISAM VIIIRNSSDP QTIIATLTLI GCSGSPWRFL |
| hrv-33 | NN..ISRKIV KWILRIISAM VVIIRNSSDP QTIIATLTLI GCSGSPWRFL |
| hrv-34 | NG..ISKKII KWLLRIISAM VIIIRNSSDP QTIIATLTLI GCSGSPWRFL |
| dq473501-34 | NG..ISKKII KWLLRIISAM VIIIRNSSDP QTIIATLTLI GCSGSPWRFL |
| dq473505-36 | SK..IGSKVI KWLLRIVSAM IIMVRNSSDP QTIIATLTLL GCSGSPWRFL |
| hrv-38 | NN..VSKKII KWMLRIISAM VIIIRNSSDP QTIIATLTLI GCSGSPWRFL |
| dq473495-38 | NN..VSKKII KWMLRIISAM VIIIRNSSDP QTIIATLTLI GCSGSPWRFL |
| ay751783-39 | GN..ISKKII KWMLRIISAM VIIIRNSSDP QTILATLTLI GCSGSPWRFL |
| hrv-40 | NN..ISKKVI KWLLRIISAM VIIIRNSSDP QTIIATLTLI GCSGSPWRFL |
| dq473491-41 | NN..ISKKVI KWLLRIVSAM VIIIRNSSDP HTVVATLTLI GCSGSPWRFL |
| hrv-43 | NN..ISKKMV KWMLRIISAM VIIIRNSSDP QTIIATLTLI GCSGSPWRFL |
| dq473499-44 | NN..ISKKII KWLLRIISAM VIIIRNSSDP QTIIATLTLI GCSGSPWRFL |
| hrv-45 | NK..ISAKVI KWLIRVISAL VIAVRSQGDP ATLSATLLLL GCSNSPWRFL |
| dq473506-46 | NK..ITSKII KWVIRIISAV TIIIRNSADP HTIVATLALL GCSGSPWRFI |
| hrv-47 | NN..ISKKII KWLLRIISAM VIIIRNSSDP QTIIATLTLI GCSGSPWRFL |
| dq473496-49 | GN..VSKKII KWMLRIISAM VIIIRNSSDP QTILATLTLI GCSGSPWRFL |
| hrv-49-f04 | GN..ISKKII KWMLRIISAM VIIIRNSSDP QTILATLTLI GCSGSPWRFL |
| hrv-50 | NS..ISKKII KWLLRIISAM VIIIRNSSDP QTIIATLTLI GCSGSPWRFL |
| hrv-51 | NK..ITGKIV KWIIRIISAI TIIIRNSADP HTVVATLALI GCSGSPWRFI |
| dq473507-53 | NK..ISSKIV KWVIRIISAI TIIIRNNADP HTIVATLALL GCSGSPWRFI |
| hrv-54 | NS..ISKKVI KWLLRIISAM VIIIRNSSDP QTIIATLTLI GCSGSPWRFL |
| hrv-54-f05 | NN..ISKKII KWLLRIISAM VIIIRNSSDP QTIIATLTLI GCSGSPWRFL |
| dq473511-55 | NN..ISKKII KWLLRIISAM VIIIRNSSDP QTIIATLTLI GCSGSPWRFL |
| hrv-56 | NN..ISKKII KWLLRIISAM VIIIRNSSDP QTIIATLTLI GCSGSPWRFL |
| hrv-57 | NS..ISKKII KWLLRIISAM VIIIRNSSDP QTIIATLTLI GCSGSPWRFL |
| hrv-58 | SK..IGSKVV KWLLRIVSAM IIMVRNSSDP QTIIATLTLL GCSGSPWKFL |
| dq473500-59 | NN..ISKKII KWMLRIISAM VIIIRNSSDP QTIIATLTLI GCSGSPWRFL |
| hrv-60 | NN..ISKKLI KWMLRIISAM VIIIRNSSDP QTIVATLTLI GCSGSPWRFL |
| hrv-61 | NN..ISKKVI KWLLRIVSAM VIIIRNSSDP QTVVATLTLI GCSGSPWRFL |
| hrv-62 | NS..ISKKII KWLLRIISAM VIIIRNSSDP QTIIATLTLI GCSGSPWRFL |
| hrv-63 | NN..ISKKII KWMLRIISAM VIIIRNSSDP QTIIATLTLI GCSGSPWRFL |
| hrv-64 | NN..ISKKLI KWLLRIVSAM VIIIRNSSDP QTVIATLTLI GCSGSPWRFL |
| ef173417-64 | NN..ISKKLI KWLLRIVSAM VIIIRNSSDP QTVIATLTLI GCSGSPWRFL |
| hrv-65 | NK..VTSKIV KWIIRIISAI TIIVRNNADP HTIIATLALL GCSGSPWRFI |
| hrv-66 | NN..ISKKII KWLLRIISAM VIIIRNSSDP QTIIATLTLI GCSGSPWRFL |
| hrv-67 | NN..ISKKII KWMLRIISAM VIIIRNSSDP QTIIATLTLI GCSGSPWRFL |
| hrv-68 | NK..ITSKIV KWTIRIVSAI TIIIRNNADP HTIVATLALL GCSGSPWRFI |
| hrv-71 | NK..ITSKIV KWIIRIISAM TIIIRNSADP HTIIATLALI GCSGSPWRFI |
| dq473492-73 | NS..ISKKVI KWLLRIVSAM VIIIRNSSDP HTVIATLTLI GCSGSPWRFL |
| dq473494-74 | NN..ISKKIV KWMLRIISAM VIIIRNCSDP QTIIATLTLI GCSGSPWRFL |
| dq473510-75 | NN..ISKKIV KWILRIISAM VIIIRNNSDP QTIIATLTLI GCSGSPWRFL |
| dq473502-76 | NN..ISRKIV KWILRIISAM VVIIRNSSDP QTIIATLTLI GCSGSPWRFL |
| hrv-76 | NN..ISRKIV KWILRIISAM VVIIRNSSDP QTIIATLTLI GCSGSPWRFL |
| hrv-77 | NN..ISKKII KWLLRIISAM VIIIRNSSDP QTIIATLTLI GCSGSPWRFL |
| hrv-78 | NK..INSKMV KWLLRIISAM VIIIRNNADP QTIIATLTLL GCSGSPWRFL |
| ef173418-78 | NK..INSKMV KWLLRIISAM VIIIRNNADP QTIIATLTLL GCSGSPWRFL |
| hrv-80 | NK..ITSKIV KWLIRIISAV TIIIRNNADP HTIIATLALI GCSGSPWRFI |
| hrv-81 | NS..ISSKMV KWMLRIISAM VIIIRNSSDP QTIIATLTLI GCNGSPWRFL |
| hrv-81-f06 | NS..ISSKMV KWMLRIISAM VIIIRNSSDP QTIIATLTLI GCNGSPWRFL |
| hrv-81-f07 | NS..ISSKMV KWMLRIISAM VIIIRNSSDP QTIIATLTLI GCNGSPWRFL |
| hrv-82 | NN..ISKKLV KWILRIISAM VIIIRNSSDP QTVIATLTLI GCSGSPWRFL |
| dq473509-82 | NN..ISKKLV KWILRIISAM VIIIRNSSDP QTVIATLTLI GCSGSPWRFL |
| hrv-85 | NN..ISKKII KWLLRIISAM VIIIRNSSDP QTIIATLTLI GCSGSPWRFL |
| pico-85 | NN..ISKKII KWLLRIISAM VIIIRNSSDP QTIIATLTLI GCSGSPWRFL |
| dq473504-88 | SK..IGSKVI KWLLRIVSAM IIMIRNSSDP QTIVATLTLL GCSGSPWRFL |
| a10937-89 | SK..IGSKVI KWLLRIVSAM IIMVRNSSDP QTVIATLTLL GCSGSPWRFL |
| hrv-89 | SK..IGSKVI KWLLRIVSAM IIMVRNSSDP QTVIATLTLL GCSGSPWRFL |
| hrv-89-f08 | SK..IGSKVI KWLLRIVSAM IIMVRNSSDP QTVIATLTLL GCSGSPWRFL |
| hrv-89-f09 | SK..IGSKVI KWLLRIVSAM IIMVRNSSDP QTVIATLTLL GCSGSPWRFL |
| m16248-89 | SK..IGSKVI KWLLRIVSAM IIMVRNSSDP QTVIATLTLL GCSGSPWRFL |
| hrv-90 | NN..ISKKII KWLLRIISAM VIIIRNSSDP QTIIATLTLI GCSGSPWRFL |
| hrv-94 | NN..ISKKLV KWLLRIVSAM VIIIRNSSDP QTVIATLTLI GCSGSPWRFL |
| ef173419-94 | NN..ISKKLV KWLLRIVSAM VIIIRNSSDP QTVIATLTLI GCSGSPWRFL |
| hrv-95 | NK..ISAKVI KWLIRVISAL VIAVRSQGDL ATLSATLVLL GCSDSPWRFL |
| hrv-96 | NS..ISKKVI KWLLRIVSAM VIIIRNSSDP QTVVATLTLI GCSGSPWRFL |
| hrv-98 | NN..ISKKII KWLLRIISAM VIIIRNSSDP QTIIATLTLI GCSGSPWRFL |
| hrv-100 | NG..ISKKII KWLLRIISAM VIIIRNSSDP QTIIATLTLI GCSGSPWRFL |
| ef186077-qpm | S.DKLTGKII KWTIRLISAL SIIVRNSTDT PTVIATLALL GCSGSPWRYL |
| ef077279-nat001 | S.DKLTGKII KWTIRLISAL SIIVRNSSDT PTVIATLALL GCSGSPWRYL |
| ny1078 | S.DKLTSKII KWTIRLISAL SIIVRNSTDT PTIIATLALL GCSGSPWRYL |
| ef582385-c024 | IKDKITSKVV KWLVRIISAL TIMIRNSTDT PTVLATLALL GCHKSPWSFL |
| ef077280-nat045 | IMDGLTNKVV KWLIRIISAM TIMIRNSSDT PTVLATLALL GCHESPWAFL |
| ef582387-c026 | S.DKLTGKII KWTIRLISAL SIIVRNSTDT PTIIATLALL GCSGSPWRYL |
| ef582386-c025 | MFDAITSKTV KWIVRIISAL TIVIRNSSDT PTVLATMALL GCTGSPWQYL |
| dq473485-03 | AKDFLTTKVL SKVVKMISAL VIICRNHDDL VTVTATLALL GCDGSPWRFL |
| ef173422-03 | AKDFLTTKVL SKVVKMISAL VIICRNHDDL VTVTATLALL GCDGSPWRFL |
| dq473490-04 | SMGYLNTKVL SKIIKIVSAL VIICRNHDDL ITVTATLALL GCDGSPWRYL |
| hrv-05 | SMGYLNTKVL SKIVKIVSAL VIICRNHDDL ITVTATLALL GCDGSPWRYL |
| dq473486-06 | AKDFLTTKVL SKVVKMISAL VIICRNHDDL VTVTATLALL GCDGSPWRFL |
| l05355-14 | AKDFLTTKVL SKVVKMVSAL VIICRNHDDL VTVTATLALL GCDGSPWRFL |
| k02121-14 | AKDFLTTKVL SKVVKMVSAL VIICRNHDDL VTVTATLALL GCDGSPWRFL |
| ef173420-17 | AKDYINVKIL SKVVKMISAL VIICRNHEDL VTVTATLALL GCDGSPWRFL |
| hrv-26 | SMGYLNTKVL SKIVKIISAL VIICRNHDDL ITVTATLALL GCDGSPWRYL |
| hrv-27 | TMGCLNTKVL SKVIKIVSAL VIICRNHEDL VTVTATLALL GCDGSPWRFL |
| ef173421-27 | TMGCLNTKVL SKVIKIVSAL VIICRNHEDL VTVTATLALL GCDGSPWRFL |
| dq473487-35 | AKDFLTTKVL SKVVKMISAL VIICRNHDDL VTVTATLALL GCDGSPWRFL |
| hrv-35 | AKDFLTTKVL SKVVKMISAL VIICRNHDDL VTVTATLALL GCDGSPWRFL |
| ef173423-37 | AKDFLTTKVL SKVVKMISAL VIICRNHDDL VTVTATLALL GCDGSPWRFL |
| hrv-42 | SLGYLNTKVL SKIVKIVSAL VIICRNHDDL ITVTATLALL GCDGSPWRYL |
| dq473488-48 | AKDYINVKIL SKVVKMVSAL VIICRNHEDL ITVTATLALL GCDGSPWRFL |
| hrv-52 | VKDYINVKIL SKVVKMVSAL VIICRNHDDL VTVTATLALL GCDGSPWRFL |
| hrv-52-f10 | VKDYINVKIL SKVVKMVSAL VIICRNHDDL VTVTATLALL GCDGSPWRFL |
| ef173424-52 | VKDYINVKIL SKVVKMVSAL VIICRNHDDL VTVTATLALL GCDGSPWRFL |
| hrv-69 | VKDYINVKIL SKVVKMISAL VIICRNHDDL ITVTATLALL GCDGSPWRFL |
| dq473489-70 | VKDYINVKIL SKVVKMISAL VIICRNHEDL VTVTATLALL GCDGSPWRFL |
| hrv-72 | AKDFLTTKVL SKVVKMVSAL VIICRNYEDL VTVTATLALL GCDGSPWRFL |
| hrv-79 | AKDFLTTKVL SKVVKMISAL VIICRNHDDL VTVTATLALL GCDGSPWRFL |
| hrv-83 | AKDFLTTKVL SKVVKMISAL VIICRNHDDL VTVTATLALL GCDGSPWRFL |
| hrv-84 | TTNYLNTKVL SKVVKIVSAL VIICRNHDDL VTVTATLALL GCDGSPWRFL |
| hrv-86 | VKDYLTTKML SKVVKMVSAL VIICRNHEDL VTVTATLALL GCDGSPWRFL |
| hrv-91 | VKDYINVKIL SKVVKMISAL VIICRNHEDL VTVTATLALL GCDGSPWRFL |
| hrv-92 | AKDFLTTKVL SKVVKMISAL VIICRNHDDL VTVTATLALL GCDGSPWRFL |
| ef173425-93 | TMGYLNTKVL SKVIKIVSAL VIICRNHDDL VTVTATLALL GCDGSPWRFL |
| hrv-97 | TMGYLNTKVL SKVIKIVSAL VIICRNHEDL VTVTATLALL GCDGSPWRFL |
| hrv-99 | SMGYLNTKVL SKIVKIVSAL VIICRNHDDL ITVTATLALL GCDGSPWRYL |
| | 1151 1200 |
| annotation | .......... ......ES.. .......... .......... .......... |
| af499637-cva13 | KKKVCDILEI .PFVLKQG.D SWMKKFTEAC NAAKGLEWIS NKISKFIDWI |
| af546702-cva21 | KKKACDLLEI .PYVMRQG.D GWMKKFTEAC NAAKGLEWIS NKISKFVDWL |
| v01149-pv1m | RKKACDVLEI .PYVIKQG.D SWLKKFTEAC NAAKGLEWVS NKISKFIDWL |
| d00239-01 | KEKFCKWTQL .TYIHKES.D SWLKKFTEMC NAARGLEWIG NKISKFIDWM |
| pico-01 | KEKFCKWTQL .TYIHKES.D SWLKKFTEMC NAARGLEWIG NKISKFIDWM |
| hrv-01 | KEKFCKWTQL .TYIHKES.D SWLKKFTEMC NAARGLEWIG NKISKFIDWM |
| x02316-02 | KEKFCKWTQL .NYIHKES.D SWLKKFTEAC NAARGLEWIG NKISKFIEWM |
| hrv-07 | KEKFCSWLQL .NYIHKES.D SWLKKFTEAC NAARGLEWIG QKISKFIDWI |
| dq473503-07 | KEKFCSWLQL .NYIHKES.D SWLKKFTEAC NAARGLEWIG QKISKFIDWI |
| hrv-08 | KQKVCQWLDL .RYVHKES.D GWIKKFTEMC NAARGLEWIG CKISKFIDWL |
| pico-09 | KEKFCKWTQL .NYVHKES.D SWLKKFTEMC NAARGLEWIG NKISKFIDWM |
| hrv-09 | KEKFCKWTQL .NYVHKES.D SWLKKFTEMC NAARGLEWIG NKISKFIDWM |
| hrv-09-f01 | KEKFCKWTQL .NYVHKES.D SWLKKFTEMC NAARGLEWIG NKISKFIDWM |
| hrv-09-f02 | KEKFCKWTQL .NYVHKES.D SWLKKFTEMC NAARGLEWIG NKISKFIDWM |
| dq473498-10 | KEKFCKWTQL .TYIHKES.D SWLKKFTEMC NAARGLEWIG NKISKFIEWM |
| hrv-10 | KEKFCKWTQL .TYIHKES.D SWLKKFTEMC NAARGLEWIG NKISKFIEWM |
| ef173414-11 | KEKFCKWTQL .NYVHKES.D TWLKKFTEMC NAARGLEWIG NKISKFIEWM |
| ef173415-12 | KEKICKWFQL .NYVHKES.D GWLKKFTEMC NAARGLEWIG NKISKFIDWL |
| hrv-13 | KEKFCKWTQL .NYIHKES.D SWLKKFTEMC NAARGLEWIG NKISKFIEWM |
| hrv-13-f03 | KEKFCKWTQL .NYIHKES.D SWLKKFTEMC NAARGLEWIG NKISKFIEWM |
| dq473493-15 | KEKFCKWTQL .NYVHKES.D SWLKKFTEMC NAARGLEWIG NKISKFIEWM |
| l24917-16 | KEKFCKWTQL .TYIHKES.D SWLKKFTEMC NAARGLEWIG NKISKFIDWM |
| hrv-18 | KEKFCKWTQL .NYIHKES.D SWLKKFTEMC NAARGLEWIG NKISKFIEWM |
| hrv-19 | KEKFCKWTQL .NYIHKES.D SWLKKFTEMC NAARGLEWIG NKISKFIDWM |
| hrv-20 | KEKVCNWLQL .VYVHKES.D GWIKKFTEMC NAARGLEWLG NKISKFIDWL |
| hrv-21 | KEKFCKWTQL .NYIHKES.D SWLKKFTEMC NAARGLEWIG NKISKFIDWM |
| hrv-22 | KEKFCKWTQL .NYVHKES.D SWLKKFTEMC NAARGLEWIG NKISKFIDWM |
| dq473497-23 | KEKFCKWTQL .SYIHKES.D SWLKKFTEAC NAARGLEWIG NKISKFIEWM |
| hrv-24 | KEKFCKWTQL .NYIHKES.D SWLKKFTEMC NAARGLEWIG NKISKFIEWM |
| ef173416-24 | KEKFCKWTQL .NYIHKES.D SWLKKFTEMC NAARGLEWIG NKISKFIEWM |
| hrv-25 | KEKFCKWTQL .NYIHKES.D SWLKKFTEMC NAARGLEWIG NKISKFIEWM |
| dq473508-28 | KEKACNWLQL .VYIHKES.D GWIKKFTEMC NAARGLEWLG NKISKFIDWL |
| hrv-29 | KEKFCKWTQL .NYIHKES.D SWLKKFTEMC NAARGLEWIG NKISKFIEWM |
| dq473512-30 | REKFCKGTQL .SYIHKES.D SWLKKFTEAC NAARGLEWIG NKISKFIEWM |
| hrv-30 | KEKFCKWTQL .SYIHKES.D SWLKKFTEAC NAARGLEWIG NKISKFIEWM |
| hrv-31 | KERFCKWTQL .NYIHKES.D SWLKKFTEMC NAARGLEWIG NKISKFIEWM |
| hrv-32 | KEKFCKWTQL .NYVHKES.D SWLKKFTEMC NAARGLEWIG NKISKFIDWM |
| hrv-33 | KEKFCKWTQL .NYIHKES.D SWLKKFTEMC NAARGLEWIG NKISKFIEWM |
| hrv-34 | KEKFCKWTQL .NYIHKES.D SWLKKFTEMC NAARGLEWIG NKISKFIDWM |
| dq473501-34 | KEKFCKWTQL .NYIHKES.D SWLKKFTEMC NAARGLEWIG NKISKFIDWM |
| dq473505-36 | KEKLCAWLQL .SYVHKQS.D SWLKKFTEAC NAARGLEWIG QKISKFIDWI |
| hrv-38 | KEKFCKWTQL .NYIHKES.D SWLKKFTEMC NAARGLEWIG NKISKFIDWM |
| dq473495-38 | KEKFCKWTQL .NYIHKES.D SWLKKFTEMC NAARGLEWIG NKISKFIDWM |
| ay751783-39 | KEKFCKWTQL .TYIHKES.D SWLKKFTEMC NAARGLEWIG NKISKFIEWM |
| hrv-40 | KEKFCKWTEL .TYIHKES.D SWLKKFTEMC NAARGLEWIG NKISKFIDWM |
| dq473491-41 | KEKFCKWTQL .NYIHKES.D SWLKKFTEMC NAARGLEWIG NKISKFIEWM |
| hrv-43 | KEKFCKWTQL .NYIHKES.D SWLKKFTEMC NAARGLEWIG NKISKFIEWM |
| dq473499-44 | KEKFCKWTQL .NYIHKES.D SWLKKFTEMC NAARGLEWIG NKISKFIEWM |
| hrv-45 | KQKVCTWLGL .RYIHKES.D GWIKKFTEMC NAARGLEWIG CKISKFIDWL |
| dq473506-46 | KEKVCGWLQL .TYIHKES.D GWIKKFTEMC NAARGLEWLG NKISKFIDWL |
| hrv-47 | KEKFCKWTQL .NYIHKES.D SWLKKFTEMC NAARGLEWIG NKISKFIEWM |
| dq473496-49 | KEKFCKWTQL .NYIHKES.D SWLKKFTEAC NAARGLEWIG NKISKFIEWM |
| hrv-49-f04 | KEKFCKWTQL .NYIHKES.D SWLKKFTEAC NAARGLEWIG NKISKFIEWM |
| hrv-50 | KEKFCKWTQL .NYIHKES.D SWLKKFTEMC NAARGLEWIG NKISKFIEWM |
| hrv-51 | KEKVCNWLQL .SYVHKES.D GWIKKFTEMC NAARGLEWLG NKISKFIDWV |
| dq473507-53 | KEKVCGWLQL .NYIHKES.D GWIKKFTEMC NAARGLEWLG NKISKFIDWL |
| hrv-54 | KEKFCKWTQL .NYIHKES.D SWLKKFTEMC NAARGLEWIG NKISKFIDWM |
| hrv-54-f05 | KEKFCKWTQL .NYIHKES.D SWLKKFTEMC NAARGLEWIG NKISKFIDWM |
| dq473511-55 | KEKFCKWTQL .NYVHKES.D SWLKKFTEMC NAARGLEWIG NKISKFIDWM |
| hrv-56 | KEKFCKWTQL .NYVHKES.D SWLKKFTEMC NAARGLEWIG NKISKFIEWM |
| hrv-57 | KEKFCKWTQL .NYIHKES.D SWLKKFTEMC NAAKGLEWIG NKISKFIDWM |
| hrv-58 | KEKFCAWLQL .NYVHKQS.D SWLKKFTEAC NAARGLEWIG QKISKFIDWI |
| dq473500-59 | KEKFCKWTQL .NYIHKES.D TWLKKFTEMC NAARGLEWIG NKISKFIEWM |
| hrv-60 | KEKFCKWTQL .TYIHKES.D SWLKKFTEMC NAARGLEWIG NKISKFIDWM |
| hrv-61 | KEKFCKWTQL .TYIHKES.D SWLKKFTEMC NAARGLEWIG NKISKFIEWM |
| hrv-62 | KEKFCKWTQL .NYIHKES.D SWLKKFTEMC NAARGLEWIG NKISKFIEWM |
| hrv-63 | KEKFCKWTQL .NYIHKES.D TWLKKFTEMC NAARGLEWIG NKISKFIEWM |
| hrv-64 | KEKFCKWTQL .NYVHKES.D SWLKKFTEMC NAARGLEWIG NKISKFIDWM |
| ef173417-64 | KEKFCKWTQL .NYVHKES.D SWLKKFTEMC NAARGLEWIG NKISKFIDWM |
| hrv-65 | KEKVCNWLHL .NYIHKES.D GWIKKFTEMC NAARGLEWLG NKISKFIDWF |
| hrv-66 | KEKFCKWTQL .NYIHKES.D SWLKKFTEMC NAARGLEWIG NKISKFIDWM |
| hrv-67 | KEKFCKWTQL .NYVHKES.D SWLKKFTEMC NAARGLEWIG NKISKFIDWM |
| hrv-68 | KEKICNWLQL .VYIHKES.D GWIKKFTEMC NAARGLEWLG NKISKFIDWL |
| hrv-71 | KDKVCKWLQL .TYVHKES.D GWIKKFTEMC NAARGLEWLG NKISKFIDWF |
| dq473492-73 | KEKFCKWTQL .NYIHKES.D SWLKKFTEMC NAARGLEWIG NKISKFIEWM |
| dq473494-74 | KEKFCKWTQL .SYIHKES.D SWLKKFTEMC NAARGLEWIG NKISKFIDWM |
| dq473510-75 | KEKFCKWTQL .SYIHKES.D SWLKKFTEMC NAARGLEWIG NKISKFIEWM |
| dq473502-76 | KEKFCKWTQL .NYIHKES.D SWLKKFTEMC NAARGLEWIG NKISKFIEWM |
| hrv-76 | KEKFCKWTQL .NYIHKES.D SWLKKFTEMC NAARGLEWIG NKISKFIEWM |
| hrv-77 | KEKFCKWTQL .NYVHKES.D SWLKKFTEMC NAARGLEWIG NKISKFIEWM |
| hrv-78 | KNKFCNWFGL .TYVHKES.D SWLKKFTEMC NAARGLEWIG NKISKFIDWI |
| ef173418-78 | KNKFCNWFGL .TYVHKES.D SWLKKFTEMC NAARGLEWIG NKISKFIDWI |
| hrv-80 | KEKVCNWLQL .NYVHKES.D NWVKKFTEMC NAARGLEWLG NKISKFIDWV |
| hrv-81 | KEKFCKWTQL .TYIHKES.D SWLKKFTEMC NAARGLEWIG NKISKFIDWM |
| hrv-81-f06 | KEKFCKWTQL .TYVHKES.D SWLKKFTEMC NAARGLEWIG NKISKFIDWM |
| hrv-81-f07 | KEKFCKWTQL .TYVHKES.D SWLKKFTEMC NAARGLEWIG NKISKFIDWM |
| hrv-82 | KEKFCKWTQL .HYVHKES.D SWLKKFTEMC NAARGLEWIG NKISKFIEWM |
| dq473509-82 | KEKFCKWTQL .HYVHKES.D SWLKKFTEMC NAARGLEWIG NKISKFIEWM |
| hrv-85 | KEKFCKWTQL .TYIHKES.D SWLKKFTEMC NAARGLEWIG NKISKFIEWM |
| pico-85 | KEKFCKWTQL .TYIHKES.D SWLKKFTEMC NAARGLEWIG NKISKFIEWM |
| dq473504-88 | KEKFCSWLQL .NYVHKES.D SWLKKFTEAC NAARGLEWIG QKISKFIDWI |
| a10937-89 | KEKLCAWLQL .SYVHKQS.D SWLKKFTEAC NAARGLEWIG QKISKFIDWI |
| hrv-89 | KEKLCAWLQL .SYVHKQS.D SWLKKFTEAC NAARGLEWIG QKISKFIDWI |
| hrv-89-f08 | KEKLCAWLQL .SYVHKQS.D SWLKKFTEAC NAARGLEWIG QKISKFIDWI |
| hrv-89-f09 | KEKLCAWLQL .SYVHKQS.D SWLKKFTEAC NAARGLEWIG QKISKFIDWI |
| m16248-89 | KEKLCAWLQL .SYVHKQS.D SWLKKFTEAC NAARGLEWIG QKISKFIDWI |
| hrv-90 | KEKFCKWTQL .NYVHKES.D SWLKKFTEMC NAARGLEWIG NKISKFIEWM |
| hrv-94 | KEKFCKWTQL .NYVHKES.D SWLKKFTEMC NAARGLEWIG NKISKFIDWM |
| ef173419-94 | KEKFCKWTQL .NYVHKES.D SWLKKFTEMC NAARGLEWIG NKISKFIDWM |
| hrv-95 | KQKVCQWLGL .RYVHKES.D GWIKKFTEMC NAARGLEWIG CKISKFIDWL |
| hrv-96 | KEKFCKWTQL .NYIHKES.D SWLKKFTEMC NAARGLEWIG NKISKFIEWM |
| hrv-98 | KEKFCKWTQL .NYIHKES.D SWLKKFTEMC NAARGLEWIG NKISKFIDWM |
| hrv-100 | KEKFCKWTQL .NYIHKES.D SWLKKFTEMC NAARGLEWIG NKISKFIEWM |
| ef186077-qpm | KDKVCKWLGI DPPPSRQS.D SWLKKFTEFC NAARGLEWIG DKLSKFIDWL |
| ef077279-nat001 | KDKVCKWLGI DPPPSRQG.D SWLKKFTEFC NAARGLEWIG DKLSKFIDWL |
| ny1078 | KDKVCRWLGI DPPPSRQG.D SWLKKFTEFC NAARGLEWIG DKLSKFIDWL |
| ef582385-c024 | KDRLCQWLNI TRPPSRQG.D GWLKKFTECC NAAKGLEWIG IKISKFIEWL |
| ef077280-nat045 | KSKVCKWLGI NPPAKRQG.D SWLKKFTEWC NAAKGLEWVG QKISRFIDWL |
| ef582387-c026 | KDKVCKWLGI DPPPSKQG.D SWLKKFTEFC NAARGLEWIG DKLSKFIDWL |
| ef582386-c025 | KTKLCAWLGV QKPPSKQS.D SWLKKFTEWC NAAKGLEWIG YKISKFIDWL |
| dq473485-03 | KMYISKHFQV .PYIERQAND GWFRKFNDAC NAAKGLEWIA NKISKLIEWI |
| ef173422-03 | KMYISKHFQV .PYIERQAND GWFRKFNDAC NAAKGLEWIA NKISKLIEWI |
| dq473490-04 | KMYISKHFCL .PYIERQSND LWFKKFNDMC NAAKGLEWIA NKISKLIDWV |
| hrv-05 | KMYISKHFCL .PYIERQSND LWFKKFNDMC NAAKGLEWIA NKISKLIEWV |
| dq473486-06 | KMYISKHFQV .PYIERQAND GWFRKFNDAC NAAKGLEWIA NKISKLIGWI |
| l05355-14 | KMYISKHFQV .PYIERQAND GWFRKFNDAC NAAKGLEWIA NKISKLIEWI |
| k02121-14 | KMYISKHFQV .PYIERQAND GWFRKFNDAC NAAKGLEWIA NKISKLIEWI |
| ef173420-17 | KMYISKHFQV .PYIERQAND GWFRKFNDAC NAAKGLEWIA NKISKLIEWV |
| hrv-26 | KMYISKHFCI .PYIERQSND LWFKKFNDMC NAAKGLEWIA NKISKLIEWV |
| hrv-27 | KMYISKHFHL .PYIERQSND LWFKKFNDMC NAAKGLEWIA NKISKLIDWI |
| ef173421-27 | KMYISKHFHL .PYIERQSND LWFKKFNDMC NAAKGLEWIA NKISKLIDWI |
| dq473487-35 | KMYISKHFQV .PYIERQAND GWFRKFNDAC NAAKGLEWIA NKISKLIEWI |
| hrv-35 | KMYISKHFQV .PYIERQAND GWFRKFNDAC NAAKGLEWIA NKISKLIEWI |
| ef173423-37 | KMYISKHFQV .PYIERQAND GWFRKFNDAC NAAKGLEWIA NKISKLIEWI |
| hrv-42 | KMYISKHFCL .PYIERQSND LWFKKFNDMC NAAKGLEWIA NKISKLIDWV |
| dq473488-48 | KMYISKHFQV .PYIERQAND GWFRKFNDAC NAAKGLEWIA NKISKLIEWV |
| hrv-52 | KMYISKHFQV .PYIERQAND GWFRKFNDAC NAAKGLEWIA NKISKLIEWV |
| hrv-52-f10 | KMYISKHFQV .PYIERQAND GWFRKFNDAC NAAKGLEWIA NKISKLIEWV |
| ef173424-52 | KMYISKHFQV .PYIERQAND GWFRKFNDAC NAAKGLEWIA NKISKLIEWV |
| hrv-69 | KMYISKHFQV .PYIERQAND GWFRKFNDAC NAAKGLEWIA NKISKLIEWV |
| dq473489-70 | KMYISKHFQV .PYIERQAND GWFRKFNDAC NAAKGLEWIA NKISKLIEWI |
| hrv-72 | KMYISKHFQV .PYIERQAND GWFRKFNDAC NAAKGLEWIA NKISKLIEWV |
| hrv-79 | KMYISKHFQV .PYIERQAND GWFRKFNDAC NAAKGLEWIA NKISKLIEWI |
| hrv-83 | KMYISKHFQV .PYIERQAND GWFRKFNDAC NAAKGLEWIA NKISKLIEWI |
| hrv-84 | KMYISKHFHL .PYIERQSND LWFKKFNDMC NAAKGLEWIA NKISKLIDWI |
| hrv-86 | KMYVSKHFQV .PYIERQAND GWFRKFNDAC NAAKGLEWIA NKISKFIDWV |
| hrv-91 | KMYISKHFQV .PYIERQAND GWFRKFNDAC NAAKGLEWIA NKISKLIEWI |
| hrv-92 | KMYISKHFQV .PYIERQAND GWFRKFNDAC NAAKGLEWIA NKISKLIEWI |
| ef173425-93 | KMYISKHFHL .PYIERQSND LWFKKFNDMC NAAKGLEWIA NKISKLIEWV |
| hrv-97 | KMYISKHFHL .PYIERQSND LWFKKFNDMC NAAKGLEWIA NKISKLIDWI |
| hrv-99 | KMYISKHFCL .PYIERQSND LWFKKFNDMC NAAKGLEWIA NKISKLIEWV |
| | 1201 1250 |
| annotation | .......... .......... .......... .......... .......... |
| af499637-cva13 | KTKIIPEARD KVEYVTKLKQ LGMLENQINT IHQSCP.SQE QQEILFNNVR |
| af546702-cva21 | KCKIIPDAKD KVEFLTKLKQ LDMLENQIAT IHQSCP.SQE QQEILFNNVR |
| v01149-pv1m | KEKIIPQARD KLEFVTKLRQ LEMLENQIST IHQSCP.SQE HQEILFNNVR |
| d00239-01 | KS.MLPQAQL KVKYLNEIKK LSLLEKQIEN LRAADNATQE K...IKCEID |
| pico-01 | KS.MLPQAQL KVKYLNEIKK LSLLEKQIEN LRAADSATQE K...IKCEID |
| hrv-01 | KS.MLPQAQL KVKYLNEIKK LSLLEKQIEN LRAADSATQE K...IKCEID |
| x02316-02 | KS.MLPQAQL KVKYLNELKK LNLYEKQVES LRVADMKTQE K...IKMEID |
| hrv-07 | KS.MLPQAQL KVEYLNKLKQ LNLLEKQIET IRLAPTCNQE K...IFCDIN |
| dq473503-07 | KS.MLPQAQL KVEYLNKLKQ LNLLEKQIET IRLAPTCNQE K...IFCDIN |
| hrv-08 | KS.MLPQAQN KIKFLQFTKQ LQLKEKQIDG LPYATIKQQE E...YLQEME |
| pico-09 | KS.MLPQAQL KVKYLSELKK LNLLEKQIDN LRCADTKVQE K...IKFEIE |
| hrv-09 | KS.MLPQAQL KVKYLSELKK LNLLEKQIDN LRCADTKVQE K...IKFEID |
| hrv-09-f01 | KS.MLPQAQL KVKYLSELKK LNLLEKQIDN LRCADTKVQE K...IKFEIE |
| hrv-09-f02 | KS.MLPQAQL KVKYLSELKK LNLLEKQIDN LRCADTKVQE K...IKFEIE |
| dq473498-10 | KS.MLPQAQL KVKYLSELKK LSFLEKQMEH LRVADSKTQE K...IKHEVD |
| hrv-10 | KS.MLPQAQL KVKYLSELKK LSFLEKQMEH LRVADSKTQE K...IKHEVD |
| ef173414-11 | KS.MLPQAQL KIKYLNELKK LNLLEKQIEH LRIADSNTQE K...IKCEID |
| ef173415-12 | KA.MLPQTQL KLEYLKLLKQ LPLLEKQIDG LRAATEKQRE D...YTETIS |
| hrv-13 | KS.MLPQAQL KVKYLNELKK LNLLEKQVEN LRCADTKTQE K...IKVEID |
| hrv-13-f03 | KS.MLPQAQL KVKYLNELKK LNLLEKQVEN LRCADTKTQE K...IKVEVD |
| dq473493-15 | KS.MLPQAQL KVKYLSELKK LNLLEKQIEN LRGADTKTQD K...IKFEID |
| l24917-16 | KS.MLPQAQL KVKYLSELKK LNFLEKQVEN LRAADTNTQE K...IKCEID |
| hrv-18 | KS.MLPQAQL KVKYLSELKK LSFLEKQMEH LRVADSKTQE K...IKCEID |
| hrv-19 | KS.MLPQAQL KVKYLSELKK LGFLEKQIEN LRCADTKTQE K...IKLEID |
| hrv-20 | KS.MLPQAKL KVEFIKNLKQ LPLLEKQVDG LRLATQKQQQ D...YIDTLT |
| hrv-21 | KS.MLPQAQL KVKYLSELKK LNLLEKQIEH LRAADSATQE K...IKCEID |
| hrv-22 | KS.MLPQAQL KVKYLSELKK LNLLEKQIEN LRGADSKTQE K...IKLEID |
| dq473497-23 | KS.MLPQAQL KVKYLNELKK LSLYEKQVES LRVADIKTQE K...IKMEID |
| hrv-24 | KS.MLPQAQL KIKYLSELKK LNLLEKQIEH LRIADSSTQE K...IKCEID |
| ef173416-24 | KS.MLPQAQL KIKYLSELKK LNLLEKQIEH LRIADSSTQE K...IKCEID |
| hrv-25 | KS.MLPQAQL KVKYLSELKK LNFLEKQMEH LRVADSQTQE K...IKHEID |
| dq473508-28 | KS.MLPQAKL KMEFIKNLKQ LPLLEKQVDG LRLATQKQQQ D...YIDILT |
| hrv-29 | KS.MLPQAQL KVKYLSELKK LSFLEKQMEH LRVADTQTQE K...IKHEID |
| dq473512-30 | KS.MLPQAQL KVKYLNELKK LSLYEKQVES LRVADIKTQE K...IKMEID |
| hrv-30 | KS.MLPQAQL KVKYLNELKK LSLYEKQVES LRVADIKTQE K...IKMEID |
| hrv-31 | KS.MLPQAQL KIKYLSELKK LSFLEKQIEY LRVADSQTQE K...IKCEID |
| hrv-32 | KS.MLPQAQL KVKYLSELKK LNLLEKQIDN LRCADTKVQE K...IKFEID |
| hrv-33 | KS.MLPQAQL KIKYLNELKK LNLLEKQIEH LRIADSSTQE K...IKCEID |
| hrv-34 | KS.MLPQAQL KVKYLNELKK LSFLEKQMEH LRVADSQTQE K...IKCEID |
| dq473501-34 | KS.MLPQAQL KVKYLNELKK LSFLEKQMEH LRVADSQTQE K...IKCEID |
| dq473505-36 | KS.MLPQAQL KVDYLTKLKQ LNLLEKQIET ITLAPANDQE K...IFTEIN |
| hrv-38 | KS.MLPQAQL KVKYLSELKK LNLLEKQIDN LRCADSKVQE K...IKLEID |
| dq473495-38 | KS.MLPQAQL KVKYLSELKK LNLLEKQIDN LRCADSKVQE K...IKLEID |
| ay751783-39 | KS.MLPQAQL KVKYLNELKR LNLYEKQVEN LRVADIKTQE K...IKMEID |
| hrv-40 | KS.MLPQAQL KVKYLSELKK LSFLEKQMEH LRVADSQTQE K...IKHEID |
| dq473491-41 | RS.MLPQAQL KVKYLSELKK LNLLEKQVEN LRCADSKTQE K...IKIEVD |
| hrv-43 | KS.MLPQAQL KVKYLAELKK LNLLEKQIEN LRGADTNTQE K...IKLEID |
| dq473499-44 | KS.MLPQAQL KVKYLSELKK LSFLEKQIEH LRVADTQTQE K...IKHEID |
| hrv-45 | KS.MLPQAQN KIKFLHFMKQ LQLKEKQIDG LPYATVKQQE D...YLKEME |
| dq473506-46 | KS.MLPQARL KVDFIKNLKQ LPLLEKQVDG LRLATQKQQQ E...YIDTLT |
| hrv-47 | KS.MLPQAQL KVKYLSELKK LSFLEKQIEH LRVADSQTQE K...IKCEID |
| dq473496-49 | KS.MLPQAQL KVKYLNELKK LSLYEKQVES LRVADVRTQE K...IKMEID |
| hrv-49-f04 | KS.MLPQAQL KVKYLNELKK LSLYEKQVES LRIADVRTQE K...IKMEID |
| hrv-50 | KS.MLPQAQL KIKYLSELKK LNFLEKQMEH LRVADSQIQE K...IKHEVD |
| hrv-51 | KS.MLPQAKL KVEYIKNLKQ LPLLEKEIDG LRLASQKQQQ E...YIDTLR |
| dq473507-53 | KS.MLPQARL KVDFIKNLKQ LPLLEKQVDG LRLATQKQQQ E...YIDTLT |
| hrv-54 | KS.MLPQAQL KIKYLSELKK LNFLEKQMEH LRVADSQTQE K...IKHEID |
| hrv-54-f05 | KS.MLPQAQL KIKYLSELKK LNLLEKQMEH LRVADSQTQE K...IKHEID |
| dq473511-55 | KS.MLPQAQL KVKYLSELKK LNLLEKQIEH LRAADSATQE K...IKCEID |
| hrv-56 | KS.MLPQAQL KIKYLSELKK LNFLEKQMEH LRIADSQTQE K...IKHEVD |
| hrv-57 | KS.MLPQAQL KIKYLSELKK LNLLEKQIEH LRVADSATQE K...IKCEID |
| hrv-58 | KG.MLPQAQL KVDYLTKLKQ LNLLEKQIET IRLAPANDQE K...IFTEIS |
| dq473500-59 | KS.MLPQAQL KVKYLEGLKK LNFLEKQIEH LRVADSQTQE K...IKCEID |
| hrv-60 | KS.MLPQAQL KVKYLSELKK LNLLEKQIEN LRGADTNTQE K...IKLEID |
| hrv-61 | KS.MLPQAQL KVKYLNELKK LNLLEKQIEN LRSADSKTQE R...IKVEID |
| hrv-62 | KS.MLPQAQL KVKYLSELKK LSFLEKQMEH LRVADSQTQE K...IKHEID |
| hrv-63 | KS.MLPQAQL KVKYLKELKK LNFLEKQIEH LRVADSQTQE K...IKCEID |
| hrv-64 | KS.MLPQAQL KVKYLSELKK LNLLEKQIEN LRGADTKTQE K...IKLEID |
| ef173417-64 | KS.MLPQAQL KVKYLSELKK LNLLEKQIEN LRGADTKTQE K...IKLEID |
| hrv-65 | KS.MLPQAKL KVEYIKNLKQ LPLLEKEIDG LRLASQKQQQ D...YIDTLK |
| hrv-66 | KS.MLPQAQL KVKYLSELKK LNFLEKQIEH LRVADSKTQE K...IKHEID |
| hrv-67 | KS.MLPQAQL KVKYLSELKK LNLLEKQIDN LRCADTKVQE K...IKFEID |
| hrv-68 | KS.MLPQAKL KVEFIKNLKQ LPLLEKQVDG LRLATQKQQQ D...YVDTLT |
| hrv-71 | KS.MLPQAKL KVEYIKNLKQ LPLLEKQIDG LRLAPQKQQQ E...YIDTLR |
| dq473492-73 | KS.MLPQAQL KVKYLNELKK LSLLEKQVEN LRCADTKTQE K...IKVEID |
| dq473494-74 | KS.MLPQAQL KVKYLSELKK LNLLEKQIEN LRSADTKTQE K...IKLEID |
| dq473510-75 | KS.MLPQAQL KVKYLSELRK LNLLEKQIEN LRAADANTQE K...IKLEID |
| dq473502-76 | KS.MLPQAQL KIKYLNELKK LNLLEKQIEH LRIADSSTQG K...IKCEID |
| hrv-76 | KS.MLPQAQL KIKYLNELKK LNLLEKQIEH LRIADSSTQE K...IKCEID |
| hrv-77 | KS.MLPQAQL KVKYLSELKK LNFLEKQIEY LRVADSRTQE K...IKHEID |
| hrv-78 | KS.MLPQAKL KVTYIQSLKQ LPLLEKSVDG LRLANPEKQY L...FLKQIE |
| ef173418-78 | KS.MLPQAKL KVTYIQSLKQ LPLLEKSVDG LRLANPEKQY L...FLKQIE |
| hrv-80 | KS.MLPQAKL KVEFIKMLKQ LPLLEKEIDG LRLASQKQQQ E...YVETLR |
| hrv-81 | KS.MLPQAQL KVKYLNELKK LNLLEKQIEN LRAADANSQE K...IKCEID |
| hrv-81-f06 | KS.MLPQAQL KVKYLNELKK LNLLEKQIEN LRAADTNTQE K...IKCEID |
| hrv-81-f07 | KS.MLPQAQL KVKYLNELKK LNLLEKQIEN LRAADTNTQE K...IKCEID |
| hrv-82 | KS.MLPQAQL KVKYLNELKK LSLLEKQIEN LRCADTKTQE K...IKVEVD |
| dq473509-82 | KS.MLPQAQL KVKYLNELKK LSLLEKQIEN LRCADAKTQE K...IKVEVD |
| hrv-85 | KS.MLPQAQL KVKYLSELKK LNLLEKQIEH LRVADSHTQE K...IKHEID |
| pico-85 | KS.MLPQAQL KVKYLSELKK LNLLEKQIEH LRVADSHTQE K...IKHEID |
| dq473504-88 | KS.MLPQAQL KVDYLTKLKQ LNLLEKQIES IRLAPSCDQE K...IFNEIN |
| a10937-89 | KS.MLPQAQL KIDYLTKLKQ LNLLEKQIET IRLAPASVQE K...IFIEIN |
| hrv-89 | KS.MLPQAQL KIDYLTKLKQ LNLLEKQIET IRLAPASVQE K...IFIEIN |
| hrv-89-f08 | KS.MLPQAQL KIDYLTKLKQ LNLLEKQIET IRLAPASDQE K...IYIEIN |
| hrv-89-f09 | KS.MLPQAQL KIDYLTKLKQ LNLLEKQIET IRLAPASDQE K...IYIEIN |
| m16248-89 | KS.MLPQAQL KIDYLTKLKQ LNLLEKQIET IRLAPASVQE K...IFIEIN |
| hrv-90 | KS.MLPQAQL KIKYLAELKK LNFLEKQIEH LRVADSKTQE K...IKCEVD |
| hrv-94 | KS.MLPQAQL KVKYLSELKK LNLLEKQIEN LRGADTRTQE K...IKLEID |
| ef173419-94 | KS.MLPQAQL KVKYLSELKK LNLLEKQIEN LRGADTRTQE K...IKLEID |
| hrv-95 | KS.MLPQAQN KIKFLQFTKQ LQLKEKQIDG LPYATIKQQE E...YLQEME |
| hrv-96 | KS.MLPQAQL KVKYLNELKK LNLLEKQIEN LRSADSKTQE R...IKIEID |
| hrv-98 | KS.MLPQAQL KIKYLSELKK LSFLEKQMEH LRVADSQTQE K...IKHEID |
| hrv-100 | KS.MLPQAQL KVKYLSELKK LSFLEKQMEH LRVADTQTQE K...IKHEID |
| ef186077-qpm | KGKILPTLRR KSDTLKECKK IPLYKEQVKA FATASEEAQD E...LMVKVN |
| ef077279-nat001 | KGKILPTLRR KSDTLKECKK IPLYKEQVKA FATASEEAQD E...LLVKVS |
| ny1078 | KGKILPTLRR KSETLKECKK IPLYKEQVRA FATASEDAQD E...LMVNIS |
| ef582385-c024 | KNRLLPTLQH KKEILDECKK IDLYQEQVKG FSKVDEPAQQ E...LLIKVE |
| ef077280-nat045 | KERVLPTVKS KKEILDHCKK IPLYQEQIKG FPYATQESQE E...LALNID |
| ef582387-c026 | KGKILPTLRR KSDTLKECKK IPLYKEQVKA FATASEEAQD E...LIVKVN |
| ef582386-c025 | KEKLIPTVQR KKDTLLECKK LTLYEDQVKA FPQSSEIFQN E...LTTKLQ |
| dq473485-03 | KNKVLPQARE KLEFCSKLKQ LDILERQIAS IHDSNP.TQE KREQLFNNVL |
| ef173422-03 | KNKVLPQARE KLEFCSKLKQ LDILERQIAS IHDSNP.TQE KREQLFNNVL |
| dq473490-04 | KQKILPQARD KLDFCKRLKQ LDILERQIDT LHVNQV.NDN DRETLFNNVL |
| hrv-05 | KQKILPQARD KLDFCRRLKQ LDILERQIDT LHMNQV.NDN DREVLFNNIL |
| dq473486-06 | KNKVLPQAKE KLEYCSKLKQ LDILERQITT MHVSNP.SQE KREQLFNNVL |
| l05355-14 | KNKVLPQAKE KLEFCSKLKQ LDILERQITT MHISNP.TQE KREQLFNNVL |
| k02121-14 | KNKVLPQAKE KLEFCSKLKQ LDILERQITT MHISNP.TQE KREQLFNNVL |
| ef173420-17 | KTKIIPQAKE KLDFCKRLKQ LDILERQIAT MHVSNP.TQE KREQLFNNVL |
| hrv-26 | KLKVLPQARD KLDFCKRLKQ LDILERQINT LHMNQI.SDN DREVLFNNVL |
| hrv-27 | KNKILPQARD KLDFCKRLKQ LDILERQIDT LHMNYT.NEN DRETLFNNVL |
| ef173421-27 | KNKILPQARD KLDFCKRLKQ LDILERQIDT LHMNYT.NEN DRETLFNNVL |
| dq473487-35 | KNKVLPQARE KLEFCSKLKQ LDILERQITT MHISNP.TQE KRKYLFNNVM |
| hrv-35 | KNKVLPQARE KLEFCSKLKQ LDILERQITT MHISNP.TQE KREQLFNNVM |
| ef173423-37 | KNKVLPQAKE KLEYCSKLKQ LDILERQITT MHVSNP.TQE KREQLFNNVL |
| hrv-42 | KQKILPQARD KLDFCRRLKQ LDILERQIDS LHMNQV.NDN DREVLFNNIL |
| dq473488-48 | KTKIIPQAKE KLDFCRRLKQ LDILERQIAT MHVSNP.TQE KREQLLNNVM |
| hrv-52 | KTKIIPQARE KLDFCKRLKQ LDILERQIAT MHVSNP.TQE KREQLFNNVL |
| hrv-52-f10 | KTKIIPQAKE KLDFCKRLKQ LDILERQITT MHVSNP.TQE KREQLFNNVL |
| ef173424-52 | KTKIIPQARE KLDFCKRLKQ LDILERQIAT MHVSNP.TQE KREQLFNNVL |
| hrv-69 | KTKIIPQAKE KLDFCKRLKQ LDILERQVTT MHVSNP.TQE KREQLFNNIL |
| dq473489-70 | KVKIIPQAKE KLDFCKRLKQ LDILERQIAT MHVSNP.TQE KREQLFNNVL |
| hrv-72 | KNKVLPQAKE KLEFCSKLKQ LDLLERQINT MHVSNP.TQE KREQLFNNVL |
| hrv-79 | KNKVLPQAKE KLEFCSKLKQ LDILERQITT MHVSNP.TQE KREQLFNNVM |
| hrv-83 | KNKVLPQAKE KLEFCSKLKQ LDILERQITT MHVSNP.TQE KREQLFNNVM |
| hrv-84 | KNKLLPQAKD KLDFCKRLKQ LDIIERQVET LHMNHT.NEN DREVLFNNIL |
| hrv-86 | KTKILPQARE KLDFCRRLKQ LDILERQITT MHISNP.TQE KREQLFNNIL |
| hrv-91 | KTKIIPQAKE KLDFCKRLKQ LDIMERQIAT MHVSNP.TQE KREQLFNNVL |
| hrv-92 | KNKVLPQAKE KLDFCSKLKQ LDMLERQITT MHVSNP.TQE KREQLFNNVM |
| ef173425-93 | KNKILPQARD KLDFCKRLKQ LDILERQIDT LHMNHT.NEN DREVLFNNVL |
| hrv-97 | KNKILPQARD KLDFCKRLKQ LDILERQIDT LHMNQT.NEN DRETLFNNVL |
| hrv-99 | KQKILPQARD KLDFCKRLKQ LDVLERQIDT LHMNQV.SDN DRETLFNNIL |
| | 1251 1300 |
| annotation | .......... .......... .......... .......... .......... |
| af499637-cva13 | WLAIQSRRFA PLYAVEAKRI SKLENTINNY IQFKSKHRIE PVCVLIHGSP |
| af546702-cva21 | WLAVQSRRFA PLYAVEARRI NKMESTINNY IQFKSKHRIE PVCMLIHGSP |
| v01149-pv1m | WLSIQSKRFA PLYAVEAKRI QKLEHTINNY IQFKSKHRIE PVCLLVHGSP |
| d00239-01 | TLHDLSCKFL PLYAHEAKRI KVLYNKCSNI I..KQRKRSE PVAVMIHGPP |
| pico-01 | TLHDLSCKFL PLYAHEAKRI KVLYNKCSNI I..KQRKRSE PVAVMIHGPP |
| hrv-01 | TLHDLSCKFL PLYAHEAKRI KVLYNKCSNI I..KQRKRSE PVAVMIHGPP |
| x02316-02 | TLHDLSRKFL PLYASEAKRI KTLYIKCDNI I..KQKKRCE PVAIVIHGPP |
| hrv-07 | TLHDLSLKFL PLYASEARRI KNLYNKCNNV I..KGGKRNE PVAVLIHGSP |
| dq473503-07 | TLHDLSLKFL PLYASEARRI KNLYNKCNNV I..KGGKRNE PVAVLIHGSP |
| hrv-08 | EMLDISNKLL PLYPRENKMI KDLLKQAKNM T..VASKRIE PVAVMFHGDP |
| pico-09 | TLHDLSCKFL PLYASEAKRI KILHNKCCNI I..KQRKRSE PVAIMIHGPP |
| hrv-09 | TLHDLSCKFL PLYASEAKRI KILHNKCCNI I..KQRKRSE PVAIMIHGPP |
| hrv-09-f01 | TLHDLSCKFL PLYASEAKRI KILHNKCCNI I..KQRKRSE PVAIMIHGPP |
| hrv-09-f02 | TLHDLSCKFL PLYASEAKRI KILHNKCCNI I..KQRKRSE PVAIMIHGPP |
| dq473498-10 | TLHDLSCKFL PLYASEAKRI KILHNKCNTI I..KQRKRCE PVAVVIHGEP |
| hrv-10 | TLHDLSCKFL PLYASEAKRI KILHNKCNTI I..KQRKRCE PVAVVIHGEP |
| ef173414-11 | TLHDLSCKFL PLYASEAKRI KVLHNKCNVI I..KQKKRCE PVAVVIHGEP |
| ef173415-12 | RLDDLSKKFL PLYPSEAKRI SVLYKRSQTI L..KTSKRTE PVGILFHGEP |
| hrv-13 | TLHDLSCKFL PLYASEAKRI KVIYNKCNNI I..KQRKRSE PVAVMIHGLP |
| hrv-13-f03 | TLHDLSCKFL PLYASEAKRI KVIYNKCSNI I..KQRKRSE PVAVMIHGSP |
| dq473493-15 | TLHDLSCKFL PLYASEAKRI KALHNKCNII I..KQKKRSE PVAIMIHGPP |
| 124917-16 | TLHDLSCKFL PLYASEAKRI KVLYHKCTNI I..KQKKRSE PVAVMIHGPP |
| hrv-18 | TLHDLSCKFL PLYASEAKRI KILHNKCNTI I..KQKKRCE PVAVVIHGEP |
| hrv-19 | TLHDLSCKFL PLYASEAKRI KVLYNKCNNI I..KQKRRSE PVAIMIHGPP |
| hrv-20 | LMLDSSNKFL PLYAVENKRI KELLKRSQMI L..RTSKRTE PVGVIFHGEP |
| hrv-21 | TLHDLSCKFL PLYASEAKRI KVLHNKCNVV I..KQKKRCE PVAVVIHGEP |
| hrv-22 | TLHDLSCKFL PLYASEAKRI KVLXNKCNNV I..KQKKRSE PVAVMIHGPP |
| dq473497-23 | TLHDLSCKFL PLYASEAKRI KTLHIKCDNI I..KQKKRCE PVAIVIHGPP |
| hrv-24 | TLHDLSCKFL PLYASEAKRI KILYNKCNVI I..KQKKRCE PVAVVIHGEP |
| ef173416-24 | TLHDLSCKFL PLYASEAKRI KILYNKCNVI I..KQKKRCE PVAVVIHGEP |
| hrv-25 | TLHDLSCKFL PLYASEAKRI KILHNKCSTI I..KQRKRCE PVAVVIHGEP |
| dq473508-28 | LMLDSSNKFL PLYAVENKRI KELLKRSQMI L..RTSKRTE PVGVIFHGEP |
| hrv-29 | TLHDLSCKFL PLYASEAKRI KILHNKCSTI I..KQRKRCE PVAVVIHGDP |
| dq473512-30 | TLHDLSCKFL PLYASEAKRI KNLHIKCNNI I..KQKKRCE PVAIVIHGPP |
| hrv-30 | TLHDLSCKFL PLYASEAKRI KNLHIKCNNI I..KQKKRCE PVAIVIHGPP |
| hrv-31 | TLHDLSCKFL PLYASEAKRI KILHNKCNTI I..KQRKRCE PVAVAIHGEP |
| hrv-32 | TLHDLSCKFL PLYASEAKRI KTLHNKCCNI I..KQKKRSE PVAIMIHGPP |
| hrv-33 | TLHDLSCKFL PLYASEAKRI KVLYNKCNVI I..KQKKRCE PVAVVIHGEP |
| hrv-34 | TLHDLSCKFL PLYASEAKRI KILHNRCSTI I..KQRKRCE PVAVVIHGEP |
| dq473501-34 | TLHDLSCKFL PLYASEAKRI KILHNRCSTI I..KQRKRCE PVAVVIHGEP |
| dq473505-36 | TLHDLSLKFL PLYASEARRI KSLYIKCSNI I..KGGKRNE PVAVLIHGSP |
| hrv-38 | TLHDLSCKFL PLYASEAKRI KVLFNKCNTI I..KQKKRSE PVAIMVHGPP |
| dq473495-38 | TLHDLSCKFL PLYASEAKRI KVLFNKCNTI I..KQKKRSE PVAIMVHGPP |
| ay751783-39 | TLHDLSCKFL PLYASEAKRI KILHNKCDTI I..KQKKRSE PVAIVVHGPP |
| hrv-40 | TLHDLSCKFL PLYASEAKRI KVLHNKCSAI I..KQKKRCE PVAVVIHGEP |
| dq473491-41 | TLHDLSCKFL PLYASEAKRI KVVYNKCNNI I..KQKKRSE PVAVMIHGSP |
| hrv-43 | TLHDLSCKFL PLYASEAKRI KVLHNKCNNI I..KQRKRSE PVAIMIHGPP |
| dq473499-44 | TLHDLSCKFL PLYASEAKRI KILHNKCSTI I..KQRKRCE PVAVVIHGDP |
| hrv-45 | EMLDISNKLL PLYPKENKII KDLLKQAKSM T..TTSKRVE PVAIMFHGDP |
| dq473506-46 | LMLDSSNKFL PLYALENKRI KELLKRGQMI L..RTSKRTE PVGVIFHGEP |
| hrv-47 | TLHDLSCKFL PLYASEAKRI KILHNKCNTI I..KQKKRCE PVAVAIHGEP |
| dq473496-49 | TLHDLSCKFL PLYAGEAKRI KTLHIKCDNI I..KQKKRCE PVAIVIHGPP |
| hrv-49-f04 | TLHDLSCKFL PLYASEAKRI KTLHIKCDNI I..KQKKRCE PVAVVIHGEP |
| hrv-50 | TLHDLSCKFL PLYASEAKRI KVLYNKCNTI I..KQKKRCE PVAVVIHGEP |
| hrv-51 | IMLDSSNKFL PLYASENKRI KELLKRSEMI L..RTSKRTE PVGVLFHGEP |
| dq473507-53 | LMLDSSNKFL PLYALENKRI KELLKRGQMI L..RTSKRTE PVGVIFHGEP |
| hrv-54 | TLHDLSCKFL PLYASEAKRI KVLYNRCSTI I..KQKKRCE PVAVVIHGEP |
| hrv-54-f05 | TLHDLSCKFL PLYASEAKRI KILHNRCSTI I..KQKKRCE PVAVVIHGEP |
| dq473511-55 | TLHDLSCKFL PLYASEAKRI KVLHNKCNVV I..KQRKRCE PVAVVIHGEP |
| hrv-56 | TLHDLSCKFL PLYASEAKRI KILYNKCNTI I..KQRKRCE PVAVVIHGEP |
| hrv-57 | TLHDLSCKFL PLYASEAKRI KVLYNKCNVV I..KQKKRCE PVAVVIHGEP |
| hrv-58 | TLHDLSLKFL PLYASEARRI KNLYIKCNNI I..KGGKRNE PVAVLIHGSP |
| dq473500-59 | TLHDLSCKFL PLYASEAKRI KVLHNKCNVI I..KQKKRCE PVAVVIHGEP |
| hrv-60 | TLHDLSCKFL PLYASEAKRI KVLFNKCNTI I..KQKKRSE PVAIMIHGPP |
| hrv-61 | TLHDLSCKFL PLYASEAKRI KVIHNKCNTI I..KQKKRSE PVAVMIHGSP |
| hrv-62 | TLHDLSCKFL PLYASEAKRI KILHNKCSTI I..KQRKRCE PVAVVIHGEP |
| hrv-63 | TLHDLSCKFL PLYASEAKRI KVLHNKCNII I..KQKKRCE PVAVVIHGEP |
| hrv-64 | TLHDLSCKFL PLYASEAKRI KVLYNKCNNV I..KQKKRSE PVAVMIHGPP |
| ef173417-64 | TLHDLSCKFL PLYASEAKRI KVLYNKCNNV I..KQKKRSE PVAVMIHGPP |
| hrv-65 | IMLDSSNKFL PLYACENKRI KELLKRSEMI L..RTSKRTE PVGVLFHGEP |
| hrv-66 | TLHDLSCKFL PLYASEAKRI KILHNRCSTI I..KQKKRCE PVAVVIHGEP |
| hrv-67 | TLHDLSCKFL PLYASEAKRI KILHNKCCNI I..KQKKRSE PVAIMIHGPP |
| hrv-68 | LMLDSSNKFL PLYATENKRI KELLKRSQMI L..RTSKRTE PVGVIFHGEP |
| hrv-71 | IMLDSSNKFL PLYASENKRI KELLKRSDMI L..RTSKRTE PVGVLFHGDP |
| dq473492-73 | TLHDLSCKFL PLYASEAKRI KVIYNKCNNI I..KQKKRSE PVAVMIHGSP |
| dq473494-74 | TLHDLSCKFL PLYASEAKRI KALHNKCNIV I..KQKKRSE PVAVMIHGPP |
| dq473510-75 | TLHDLSCKFL PLYASEAKRI KALYNKCNNI I..KQRKRSE PVAIMIHGPP |
| dq473502-76 | TLHDLSCKFL PLYASEAKRI KVLHNKCNVI I..KQKKRCE PVAVVIHGEP |
| hrv-76 | TLHDLSCKFL PLYASEAKRI KVLHNKCNVI I..KQKKRCE PVAVVIHGEP |
| hrv-77 | TLHDLSCKFL PLYASEAKRI KILHNRCNTI I..KQKKRCE PVAVVIHGEP |
| hrv-78 | EMKDLSNKFL PLYANEAKRI KALAHKASNI V..KNAKRVE PVAVMFHGNP |
| ef173418-78 | EMKDLSNKFL PLYANEAKRI KALAHKASNI V..KNAKRVE PVAVMFHGNP |
| hrv-80 | IMADSSRKFL PLYASENKRI NDLLRRSEMV M..LTAKRTE PVGVLFHGEP |
| hrv-81 | TLHDLSCKFL PLYASEAKRI KVLYHKCTNI I..KQKKRSE PVAVMIHGPP |
| hrv-81-f06 | TLHDLSCKFL PLYASEAKRI KVLYHKCTNI I..KQKKRSE PVAVMIHGPP |
| hrv-81-f07 | TLHDLSCKFL PLYASEAKRI KVLYHKCTNI I..KQKKRSE PVAVMIHGPP |
| hrv-82 | TLHDLSCKFL PLYASEAKRI KVLYNKCNNI I..KQKKRSE PVAVMIHGPP |
| dq473509-82 | TLHDLSCKFL PLYASEAKRI KVLYNKCNNI I..KQKKRSE PVAVMIHGPP |
| hrv-85 | TLHDLSCKFL PLYASEAKRI KILHNKCSAI I..KQKKRCE PVAVVIHGEP |
| pico-85 | TLHDLSCKFL PLYASEAKRI KILHNKCSAI I..KQKKRCE PVAVVIHGEP |
| dq473504-88 | TLHDLSLKFL PLYASEARRI KNLYIKCNNI I..KGGKRNE PVAVLIHGSP |
| a10937-89 | TLHDLSLKFL PLYASEARRI KNLYIKCSNV I..KGGKRNE PVAVLIHGSP |
| hrv-89 | TLHDLSLKFL PLYASEARRI KNLYIKCSNV I..KGGKRNE PVAVLIHGSP |
| hrv-89-f08 | TLHDLSLKFL PLYASEARRI KNLYIKCSNV I..KGGKRNE PVAVLIHGSP |
| hrv-89-f09 | TLHDLSLKFL PLYASEARRI KNLYIKCSNV I..KGGKRNE PVAVLIHGSP |
| m16248-89 | TLHDLSLKFL PLYASEARRI KNLYIKCSNV I..KGGKRNE PVAVLIHGSP |
| hrv-90 | TLHDLSCKFL PLYASEAKRI KALHNKCNVI I..KQKKRCE PVAVVIHGEP |
| hrv-94 | TLHDLSCKFL PLYASEAKRI KVLYNKCNNI I..KQKKRSE PVAVMIHGPP |
| ef173419-94 | TLHDLSCKFL PLYASEAKRI KVLYNKCNNI I..KQKKRSE PVAVMIHGPP |
| hrv-95 | EMLDISNKLL PLYPRENKMI KDLLKQAKNM T..VASKRIE PVAVMFHGDP |
| hrv-96 | TLHDLSCKFL PLYASEAKRI KVIHNKCNNI I..KQKKRSE PVAVMIHGSP |
| hrv-98 | TLHDLSCKFL PLYASEAKRI KILHNRCSTI I..RQKKRCE PVAVVIHGEP |
| hrv-100 | TLHDLSCKFL PLYASEAKRI KILHNKCNAI I..KQRKRCE PVAVVIHGEP |
| ef186077-qpm | KLEKGLQDLA PLYALEAKQV REMSRELQRM MCYKKTHRTE PVCILLHGQP |
| ef077279-nat001 | KLEKGLQDLA PLYACEAKQV REMSRELQRM MCYKKTHRTE PVCILLHGQP |
| ny1078 | KLEKGLQDLA PLYACEAKQV REMSRDLQRM MCYKKTHRTE PVCILLHGQP |
| ef582385-c024 | KLKKGLDSLA PLYAVENKRV TNIYKELKAL SAYKTTQRTE PVCILIRGAP |
| ef077280-nat045 | KLKKGLDGLA PLYAVENKTV TQMQKEIKQL QCYKRTQRIE PVCILLHGIP |
| ef582387-c026 | KLEKGLQDLA PLYACEAKQV REMSRELQRM MCYKKTHRTE PVCILLHGQP |
| ef582386-c025 | VLKKNLDDMC PLYAVENKRV TNMLKEIKTM TAYKKTHRTE PVCILIHGGP |
| dq473485-03 | WLEQMSQKFS PLYASEAKRI RDLKNKITNY MQFKSKQRTE PVCVLIHGTP |
| ef173422-03 | WLEQMSQKFS PLYASEAKRI RDLKNKITNY MQFKSKQRTE PVCVLIHGTP |
| dq473490-04 | WLEQMSQKFA PLYAVEAKRI KSLKNKITNF IQFRSKHRTE PVCVLIHGTP |
| hrv-05 | WLEQMSQKFA PLYAVEAKRI KTLKNKMTNF IQFRSKHRTE PVCVLVHGSP |
| dq473486-06 | WLEQMSQKFA PLYAAESKRI KDLKNKIMNY MQFKSKQRTE PVCVLIHGTP |
| 105355-14 | WLEQMSQKFA PHYAVESKRI RELKNKMVNY MQFKSKQRTE PVCVLIHGTP |
| k02121-14 | WLEQMSQKFA PFYAVESKRI RELKNKMVNY MQFKSKQRTE PVCVLIHGTP |
| ef173420-17 | WLEQMSQKFA PLYAVEARRI KELKTKIVNY MQFKSKQRTE PVCVLIHGSP |
| hrv-26 | WLEQMSQKFA PLYAVESKRI RTLKNKMTNF IQFRSKHRTE PVCVLIHGTP |
| hrv-27 | WLEQMSQKFA PLYALEAKRI KSLKNKLTNF IQFRSKHRTE PVCVLIHGTP |
| ef173421-27 | WLEQMSQKFA PLYALEAKRI KSLKNKLTNF IQFRSKHRTE PVCVLIHGTP |
| dq473487-35 | WLEQMSQKFA PLYATEAKRI RDLKNKIVNY MQFRNKQRTE PVCVLIHGTP |
| hrv-35 | WLEQMSQKFA PLYATEAKRI RDLKNKIVNY MQFRNKQRTE PVCVLIHGTP |
| ef173423-37 | WLEQMSQKFA PLYAAESKRI RDLKNKIMNY MQFKNKQRTE PVCVLIHGTP |
| hrv-42 | WLEQMSQKFA PLYAVEAKRI KMLKNKMTNF IQFRSKHRTE PVCVLIHGSP |
| dq473488-48 | WLEQMSQKFA PLYAVEARRI KEMKTKMMNY IQFKSKQRTE PVCVLIHGSP |
| hrv-52 | WLEQMSQKFA PLYAVEARRI KEMKTKVMNY IQFKSKQRTE PVCVLIHGSP |
| hrv-52-f10 | WLEQMSQKFA PLYAVEARRI KEMKTKMMNY IQFKSKQRTE PVCVLIHGSP |
| ef173424-52 | WLEQMSQKFA PLYAVEARRI KEMKTKVMNY IQFKSKQRTE PVCVLIHGSP |
| hrv-69 | WLEQMSQKFA PLYAVEARRX KEMKMKMMNY IQFKSKHRTE PVCVLIHGSP |
| dq473489-70 | WLEQMSQKFA PLYAVEARRI KELKTKIVNY MQFKSKQRTE PVCVLIHGSP |
| hrv-72 | WLEQMSQKFA PLYATEAKRI RELKNKIVNY MQFRNKQRTE PVCVLIHGTP |
| hrv-79 | WLEQMSQKFA PLYAAEAKRI RELKNKILNY MQFRSKQRTE PVCVLIHGTP |
| hrv-83 | WLEQMSQKFA PLYAAEARRI KDLKNKILNY MQFKNKQRTE PVCVLIHGTP |
| hrv-84 | WLEQMSQKFA PLYAAEAKRI KTLKNKMTNF IQFRSKHRTE PVCVLIHGSP |
| hrv-86 | WLEQMSQKFA PLYATEGKRI RDLKNKMLNY IQFKSKQRTE PVCVLIHGTP |
| hrv-91 | WLEQMSQKFA PLYAVEARRI KELKTKMVNY MQFKSKQRTE PVCVLIHGSP |
| hrv-92 | WLEQMSQKFA PLYAAEAKRI RELKNKILNY MQFKNKQRTE PVCVLIHGTP |
| ef173425-93 | WLEQMSQKFA PLYALEAKRI RTLKNKMTNF IQFRSKHRTD PVRVLIHGTP |
| hrv-97 | WLEQMSQKFA PLYALEAKRI RSLKNKITNF IQFRSKHRTE PVCVLIHGTP |
| hrv-99 | WLEQMSQKFA PLYAVEAKRI RVLKNKMTNF IQFRSKHRTE PVCVLIHGTP |
| | 1301 1350 |
| annotation | .......... .......... .......... .......... .......... |
| af499637-cva13 | GTGKSVATSL MGRAIAEKEG TSTYSLPPDP THFDGYKQQG VVIMDDLNQN |
| af546702-cva21 | GTGKSIATSL IGRAIAEKES TSVYSMPPDP SHFDGYKQQG VVIMDDLNQN |
| v01149-pv1m | GTGKSVATNL IARAIAEREN TSTYSLPPDP SHFDGYKQQG VVIMDDLNQN |
| d00239-01 | GTGKSITTNF LARMITN..E SDVYSLPPDP KYFDGYDNQS VVIMDDIMQN |
| pico-01 | GTGKSITTNF LARMITN..E SDVYSLPPDP KYFDGYDNQS VVIMDDIMQN |
| hrv-01 | GTGKSITTNF LARMITN..E SDVYSLPPDP KYFDGYDNQS VVIMDDIMQN |
| x02316-02 | GAGKSITTNF LAKMITN..D SDIYSLPPDP KYFDGYDQQS VVIMDDIMQN |
| hrv-07 | GTGKSLATSV LARMLTV..E TDIYSLPPDP KYFDGYDQQS VVIMDDIMQN |
| dq473503-07 | GTGKSLATSV LARMLTV..E TDIYSLPPDP KYFDGYDQQS VVIMDDIMQN |
| hrv-08 | GSGKSICTNI LARMITN..P SDIYSLPPDP KYFDGYHQQT VVIMDDVMQN |
| pico-09 | GTGKPITTSF LARMITN..E SDIYSLPPDP KYFDGYDQQS VVIMDDIMQN |
| hrv-09 | GTGKSITTSF LARMITN..E SDIYSLPPDP KYFDGYDQQS VVIMDDIMQN |
| hrv-09-f01 | GTGKSITTSF LARMITN..E SDIYSLPPDP KYFDGYDQQS VVIMDDIMQN |
| hrv-09-f02 | GTGKSITTSF LARMITN..E SDIYSLPPDP KYFDGYDQQS VVIMDDIMQN |
| dq473498-10 | GTGKSMTTNF LARMITS..E SDIYSLPPDP KYFDGYDQQS VVIMDDVMQN |
| hrv-10 | GTGKSMTTNF LARMITS..E SDIYSLPPDP KYFDGYDQQS VVIMDDVMQN |
| ef173414-11 | GTGKSMTTNF LARMITN..D SDIYSLPPDP KYFDGYDQQS VVIMDDIMQN |
| ef173415-12 | GTGKSITTSV LARMLTS..D SDIYSLPPAP KYFD.VRPQT GVIMDDIMQN |
| hrv-13 | GTGKSITTSF LARMITN..E SDIYSLPPDP KYFDGYDQQS VVIMDDIMQN |
| hrv-13-f03 | GTGKSITTSF LARMITN..E SDIYSLPPDP KYFDGYDQQS VVIMDDIMQN |
| dq473493-15 | GTGKSITTSF LARMITS..E SDIYSLPPDP KYFDGYDQQS VVIMDDIMQN |
| 124917-16 | GTGKSITTSF LARMITN..E SDIYSLPPDP KYFDGYDNQS VVIMDDIMQN |
| hrv-18 | GTGKSMTTNF LARMITS..D SDIYSLPPDP KYFDGYDQQS VVIMDDIMQN |
| hrv-19 | GTGKSITTSF LARMITN..E SDVYSLPPDP KYFDGYDQQS VVIMDDIMQN |
| hrv-20 | GTGKSITTSI LARMLTT..E SDIYSLPPSP KYFDGYDQQS VVIMDDIMQN |
| hrv-21 | GTGKSMTTNF LARMITN..D SDIYSLPPDP KYFDGYDQQS VVIMDDIMQN |
| hrv-22 | GTGKSITTSF LARMLTN..E SDIYSLPPDP KYFDGYDQQS VVIMDDIMQN |
| dq473497-23 | GAGKSITTNF LAKMITN..D SDIYSLPPDP KYFDGYDQQS VVIMDDIMQN |
| hrv-24 | GTGKSMTTNF LARMITN..D SDIYSLPPDP KYFDGYDQQS VVIMDDIMQN |
| ef173416-24 | GTGKSMTTNF LARMITN..D SDIYSLPPDP KYFDGYDQQS VVIMDDIMQN |
| hrv-25 | GTGKSMTTNF LARMITN..D SDIYSLPPDP KYFDGYDQQS VVIMDDIMQN |
| dq473508-28 | GTGKSITTSI LARMLTT..E SDIYSLPPSP KYFDGYDQQS VVIMDDIMQN |
| hrv-29 | GTGKSMTTSF LARMITN..E SDIYSLPPDP KYFDGYDQQS VVIMDDVMQN |
| dq473512-30 | GAGKSITTNF LAKMITN..D SDIYSLPPDP KYFDGYDQQS VVIMDDIMQN |
| hrv-30 | GAGKSITTNF LAKMITN..D SDIYSLPPDP KYFDGYDQQS VVIMDDIMQN |
| hrv-31 | GTGKSMTTNF LARMITN..D SDIYSLPPDP KYFDGYDQQS VVIMDDIMQN |
| hrv-32 | GTGKSITTSF LARMITN..E SDIYSLPPDP KYFDGYDQQS VVIMDDIMQN |
| hrv-33 | GAGKSMTTNF LARMITN..D SDIYSLPPDP KYFDGYDQQS VVIMDDIMQN |
| hrv-34 | GTGKSMTTNF LARMITN..D SDIYSLPPDP KYFDGYDQQS VVIMDDIMQN |
| dq473501-34 | GTGKSMTTNF LARMITN..D SDIYSLPPDP KYFDGYDQQS VVIMDDIMQN |
| dq473505-36 | GTGKSLATSV LARMLTV..E TDIYSLPPDP KYFDGYDQQS VVIMDDIMQN |
| hrv-38 | GTGKSITTSF LARMITN..E SDVYSLPPDP KYFDGYDQQS VVIMDDIMQN |
| dq473495-38 | GTGKSITTSF LARMITN..E SDVYSLPPDP KYFDGYDQQS VVIMDDIMQN |
| ay751783-39 | GTGKSITTSF LARMITN..D SDIYSLPPDP KYFDGYDQQS VVIMDDIMQN |
| hrv-40 | GTGKSMTTNF LARMITS..D SDIYSLPPDP KYFDGYDQQS VVIMDDVMQN |
| dq473491-41 | GTGKSITTSF LARMITN..E SDIYSLPPDP KYFDGYDQQS VVIMDDIMQN |
| hrv-43 | GTGKSITTSF LARMITN..E SDVYSLPPDP KYFDGYDQQS VVIMDDIMQN |
| dq473499-44 | GTGKSMTTSF LARMITN..E SDIYSLPPDP KYFDGYDQQS VVIMDDVMQN |
| hrv-45 | GSGKSVCTNI LARMITN..P SDIYSLPPNP KYFDGYHQQT VVIMDDVMQN |
| dq473506-46 | GTGKSITTSI LARMLTS..E SDIYSLPPSP KYFDGYDQQS VVIMDDIMQN |
| hrv-47 | GTGKSMTTNF LARMITN..D SDIYSLPPDP KYFDGYDQQS VVIMDDIMQN |
| dq473496-49 | GAGKSITTNF LARMITN..D SDIYSLPPDP KYFDGYDQQS VVIMDDIMQN |
| hrv-49-f04 | GAGKSITTNF LARMITN..D SDIYSLPPDP KYFDGYDQQS VVIMDDIMQN |
| hrv-50 | GTGKSMTTSF LARMITN..E SDIYSLPPDP KYFDGYDQQS VVIMDDVMQN |
| hrv-51 | GTGKSIATSI LARMLTT..E SDIYSLPPSP KYFDGYDQQS VVIMDDIMQN |
| dq473507-53 | GTGKSITTSI LARMLTS..E SDIYSLPPSP KYFDGYDQQS VVIMDDIMQN |
| hrv-54 | GTGKSMTTNF LARMITN..D SDIYSLPPDP KYFDGYDQQS VVIMDDVMQN |
| hrv-54-f05 | GTGKSMTTNF LARMITN..D SDIYSLPPDP KYFDGYDQQS VVIMDDVMQN |
| dq473511-55 | GTGKSMTTNF LARMITN..D SDIYSLPPDP KYFDGYDQQS VVIMDDIMQN |
| hrv-56 | GTGKSMTTNF LARMITT..E SDIYSLPPDP KYFDGYDQQS VVIMDDVMQN |
| hrv-57 | GTGKSMTTNF LARMITN..D SDIYSLPPDP KYFDGYDQQS VVIMDDIMQN |
| hrv-58 | GTGKSLATSV LARMLTV..E TDIYSLPPDP KYFDGYDQQS VVIMDDIMQN |
| dq473500-59 | GTGKSMTTNF LARMITN..D SDIYSLPPDP KYFDGYDQQS VVIMDDIMQN |
| hrv-60 | GTGKSITTSF LARMITN..E SDIYSLPPDP KYFDGYDQQS VVIMDDIMQN |
| hrv-61 | GTGKSITTNF LARMITN..E SDIYSLPPDP KYFDGYDQQS VVIMDDIMQN |
| hrv-62 | GTGKSMTTNF LARMITN..D SDIYSLPPDP KYFDGYDQQS VVIMDDIMQN |
| hrv-63 | GTGKSMTTNF LARMITN..D SDIYSLPPDP KYFDGYDQQS VVIMDDIMQN |
| hrv-64 | GTGKSITTSF LARMLTN..E SDIYSLPPDP KYFDGYDQQS VVIMDDIMQN |
| ef173417-64 | GTGKSITTSF LARMLTN..E SDIYSLPPDP KYFDGYDQQS VVIMDDIMQN |
| hrv-65 | GTGKSIATSI LARMLTT..E SDIYSLPPSP KYFDGYDQQS VVIMDDIMQN |
| hrv-66 | GTGKSMTTNF LARMITS..D SDIYSLPPDP KYFDGYDQQS VVIMDDIMQN |
| hrv-67 | GTGKSITTSF LARMITN..E SDIYSLPPDP KYFDGYDQQS VVIMDDIMQN |
| hrv-68 | GTGKSITTSI LARMLTT..E SDIYSLPPSP KYFDGYDQQS VVIMDDIMQN |
| hrv-71 | GTGKSIATSI LARMITT..E SDIYSLPPSP KYFDGYDQQS VVIMDDIMQN |
| dq473492-73 | GTGKSITTSF LARMITN..E SDIYSLPPDP KYFDGYDQQS VVIMDDIMQN |
| dq473494-74 | GTGKSITTSF LARMITN..E SDIYSLPPDP KYFDGYDQQS VVIMDDIMQN |
| dq473510-75 | GTGKSITTSF LARMITN..E SDVYSLPPDP KYFDGYDQQS VVIMDDIMQN |
| dq473502-76 | GAGKSMTTNF LARMITN..D SDIYSLPPDP KYFDGYDQQS VVIMDDIMQN |
| hrv-76 | GAGKSMTTNF LARMITN..D SDIYSLPPDP KYFDGYDQQS VVIMDDIMQN |
| hrv-77 | GTGKSMTTNF LARMITN..D SDIYSLPPDP KYFDGYDQQS VVIMDDIMQN |
| hrv-78 | GTGKSLATNF LGRMITS..E TDIYSLPPDP KHFDGYDQQT VVIMDDVMQN |
| ef173418-78 | GTGKSLATNF LGRMITS..E TDIYSLPPDP KHFDGYDQQT VVIMDDVMQN |
| hrv-80 | GTGKSIATSI LGRMLTN..E SDIYSLPPSP KYFDGYDQQS VVIMDDIMQN |
| hrv-81 | GTGKSITTSF LARMITN..E SDIYSLPPDP KYFDGYDNQS VVIMDDIMQN |
| hrv-81-f06 | GTGKSITTSF LARMITN..E SDIYSLPPDP KYFDGYDNQS VVIMDDIMQN |
| hrv-81-f07 | GTGKSITTSF LARMITN..E SDIYSLPPDP KYFDGYDNQS VVIMDDIMQN |
| hrv-82 | GTGKSITTSF LARMITN..E SDIYSLPPDP KYFDGYDQQS VVIMDDIMQN |
| dq473509-82 | GTGKSITTSF LARMITN..E SDIYSLPPDP KYFDGYDQQS VVIMDDIMQN |
| hrv-85 | GTGKSMTTNF LARMITS..D SDIYSLPPDP KYFDGYDQQS VVIMDDVMQN |
| pico-85 | GTGKSMTTNF LARMITS..D SDIYSLPPDP KYFDGYDQQS VVIMDDVMQN |
| dq473504-88 | GTGKSLATSV LARMLTV..E TDIYSLPPDP KYFDGYDQQS VVIMDDIMQN |
| a10937-89 | GTGKSLATSV LARMLTV..E TDIYSLPPDP KYFDGYDQQS VVIMDDIMQN |
| hrv-89 | GTGKSLATSV LARMLTV..E TDIYSLPPDP KYFDGYDQQS VVIMDDIMQN |
| hrv-89-f08 | GTGKSLATSV LARMLTV..E TDIYSLPPDP KYFDGYDQQS VVIMDDIMQN |
| hrv-89-f09 | GTGKSLATSV LARMLTV..E TDIYSLPPDP KYFDGYDQQS VVIMDDIMQN |
| m16248-89 | GTGKSLATSV LARMLTV..E TDIYSLPPDP KYFDGYDQQS VVIMDDIMQN |
| hrv-90 | GTGKSMTTNF LARMITN..D SDIYSLPPDP KYFDGYDQQS VVIMDDIMQN |
| hrv-94 | GTGKSITTSF LARMLTN..E SDIYSLPPDP KYFDGYDQQS VVIMDDIMQN |
| ef173419-94 | GTGKSITTSF LARMLTN..E SDIYSLPPDP KYFDGYDQQS VVIMDDIMQN |
| hrv-95 | GSGKSICTNI LARMITN..P SDIYSLPPDP KYFDGYHQQT VVIMDDVMQN |
| hrv-96 | GTGKSITTSF LARMITN..E SDIYSLPPDP KYFDGYDQQS VVIMDDIMQN |
| hrv-98 | GTGKSMTTSF LARMITN..D SDIYSLPPDP KYFDGYDQQS VVIMDDVMQN |
| hrv-100 | GTGKSMTTNF LARMITS..D SDIYSLPPDP KYFDGYDQQS VVIMDDIMQN |
| ef186077-qpm | GCGKSLASKV IARGLTS..E SNVYSLPPDP KYFDGYNQQE VVIMDDVGQN |
| ef077279-nat001 | GCGKSLASKI IARGLTN..E SNVYSLPPDP KYFDGYNQQE VVIMDDVGQN |
| ny1078 | GCGKSLASKI VARGLTN..E SNVYSLPPDP KYFDGYNQQE VVIMDDVGQN |
| ef582385-c024 | GCGKSLVTSI IARGLTK..P GDIYSLPPDP KHFDGYDQQE VVIMDDLGQN |
| ef077280-nat045 | GCGKSLITTI IARGLAT..E GNIYSLPPNP KHFDGYNQQD VVIMDDVCQN |
| ef582387-c026 | GCGKSLASKV IARGLTN..E SNVYSLPPDP KYFDGYNQQE VVIMDDVGQN |
| ef582386-c025 | GCGKSLATTV IARGLAD..S GNVYSLPPNP KHFDGYCQQQ VVMMDDLGQN |
| dq473485-03 | GSGKSLTTSI VGRALAEHFN SSVYSLPPDP KHFDGYQQQE VVIMDDLNQN |
| ef173422-03 | GSGKSLTTSI VGRALAEHFN SSVYSLPPDP KHFDGYQQQE VVIMDDLNQN |
| dq473490-04 | GSGKSLTTSL VGRAIADNYN SSVYSLPPDP KHFDGYQQQA VVILDDLNQN |
| hrv-05 | GSGKSLTTSL IGRAIADNCG SSVYSLPPDP KHFDGYQQQA VVILDDLNQN |
| dq473486-06 | GSGKSLTTSI VGRALAEHFN SSVYSLPPDP KHFDGYQQQE VVIMDDLNQN |
| 105355-14 | GSGKSLTTSI VGRAIAEHFN SAVYSLPPDP KHFDGYQQQE VVIMDDLNQN |
| k02121-14 | GSGKSLTTSI VGRAIAEHFN SAVYSLPPDP KHFDGYQQQE VVIMDDLNQN |
| ef173420-17 | GSGKSLTTSI IGRAIAEKFK STVYSLPPDP KHFDGYQQQE VVIMDDLNQN |
| hrv-26 | GSGKSLTTSL IGRAIADNYG SSVYSLPPDP KHFDGYQQQA VVILDDLNQN |
| hrv-27 | GSGKSLTTSL IGRSIADIHR SSVYSLPPDP KHFDGYQQQA VVILDDLNQN |
| ef173421-27 | GSGKSLTTSL IGRSIADIHR SSVYSLPPDP KHFDGYQQQA VVILDDLNQN |
| dq473487-35 | GSGKSLTTSI VGRALAEHFN SAVYSLPPDP KHFDGYQQQE VVIMDDLNQN |
| hrv-35 | GSGKSLTTSI VGRALAEHFN SAVYSLPPDP KHFDGYQQQE VVIMDDLNQN |
| ef173423-37 | GSGKSLTTSI VGRALAEHFN SAVYSLPPDP KHFDGYQQQE VVIMDDLNQN |
| hrv-42 | GSGKSLTTSL IGRAIADSCG SSVYSLPPDP KHFDGYQQQA VVILDDLNQN |
| dq473488-48 | GSGKSLTTSI IGRAIAERYK STVYSLPPDP KHFDGYQQQE VVIMDDLNQN |
| hrv-52 | GSGKSLTTSI IGRAIAERFK STVYSLPPDP KHFDGYQQQE VVIMDDLNQN |
| hrv-52-f10 | GSGKSLTTSI IGRAIAERFK STVYSLPPDP KHFDGYQQQE VVIMDDLNQN |
| ef173424-52 | GSGKSLTTSI IGRAIAERFK STVYSLPPDP KHFDGYQQQE VVIMDDLNQN |
| hrv-69 | GSGKSLTTSI IGRAIAERFK STVYSLPPDP KHFDGYQQQE VVIMDDLNQN |
| dq473489-70 | GSGKSLTTSI VGRAIAERFK STVYSLPPDP KHFDGYQQQE VVIMDDLNQN |
| hrv-72 | GSGKSLTTSI IGRAIAEQFN SAVYSLPPDP KHFDGYQQQE VVIMDDLNQN |
| hrv-79 | GSGKSLTTSI VGRALAEHFN SSVYSLPPDP KHFDGYQQQE VVIMDDLNQN |
| hrv-83 | GSGKSLTTSI VGRALAEHFN SAVYSLPPDP KHFDGYQQQE VVIMDDLNQN |
| hrv-84 | GSGKSLATSL IGRSIADNHK SSVYSLPPDP KHFDGYQQQA VVILDDLNQN |
| hrv-86 | GSGKSLTTSI VGRALAEHYN SAVYSLPPDP KHFDGYQQQE VVIMDDLNQN |
| hrv-91 | GSGKSLTTSI IGRAIAERFK STVYSLPPDP KHFDGYQQQE VVIMDDLNQN |
| hrv-92 | GSGKSLTTSI VGRALAEHLN SAVYSLPPDP KHFDGYQQQE VVIMDDLNQN |
| ef173425-93 | GSGKSLATSL IGRSIADIHK SSVYSLPPDP KHFDGYQQQA VVILDDLNQN |
| hrv-97 | GSGKSLTTSL IGRSIAEIYK SSVYSLPPDP KHFDGYQQQA VVILDDLNQN |
| hrv-99 | GSGKSLTTSL IGRAIADSCG SSVYSLPPDP KHFDGYQQQA VVILDDLNQN |
| | 1351 1400 |
| annotation | .......... .......... .......... .......... .......... |
| af499637-cva13 | PDGMDMKLFC QMVSTVEFIP PMASLEEKGI LFTSDYVLAS TNSSTITPPT |
| af546702-cva21 | PDGMDMKLFC QMVSTVEFIP PMASLEEKGI LFTSDYVLAS TNSHSIVPPT |
| v01149-pv1m | PDGADMKLFC QMVSTVEFIP PMASLEEKGI LFTSNYVLAS TNSSRISPPT |
| d00239-01 | PDGEDMTLFC QMVSSVTFIP PMADLPDKGK PFDSRFVLCS TNHSLLAPPT |
| pico-01 | PDGEDMTLFC QMVSSVTFIP PMADLPDKGK PFDSRFILCS TNHSLLAPPT |
| hrv-01 | PDGEDMTLFC QMVSSVTFIP PMADLPDKGK PFDSRFILCS TNHSLLAPPT |
| x02316-02 | PAGDDMTLFC QMVSSVTFIP PMADLPDKGK AFDSRFVLCS TNHSLLTPPT |
| hrv-07 | PNGEDMTLFC QMVSSVPFIP PMADLPDKGK PFTSKFVLAS TNHTLLTPPT |
| dq473503-07 | PNGEDMTLFC QMVSSVPFIP PMADLPDKGK PFTSKFVLAS TNHTLLTPPT |
| hrv-08 | PNGEDMSTFC QMVSSVNYVV PMADLPDKGT LFSSDYVFCS TNQHILTPPT |
| pico-09 | PGGEDMSLFC QMVSSVTFIP PMADLPDKGK PFDSRFVFCS TNHSLLAPPT |
| hrv-09 | PGGEDMSLFC QMVSSVTFIP PMADLPDKGK PFDSRFVFCS TNHSLLAPPT |
| hrv-09-f01 | PGGEDMSLFC QMVSSVTFIP PMADLPDKGK PFDSRFVFCS TNHSLLAPPT |
| hrv-09-f02 | PGGEDMSLFC QMVSSVTFIP PMADLPDKGK PFDSRFVFCS TNHSLLAPPT |
| dq473498-10 | PSGEDMTLFC QMVSSVTFIP PMADLPDKGK PFDSRFVLCS TNHNLLAPPT |
| hrv-10 | PSGEDMTLFC QMVSSVTFIP PMADLPDKGK PFDSRFVLCS TNHNLLAPPT |
| ef173414-11 | PSGDDMTLFC QMVSSVTFIP PMADLPDKGK PFDSRFVLCS TNHSMLAPPT |
| ef173415-12 | PSGEDMTLFC QMVSSVPFIP PMADLPDKGK HFTSEYVLAS TNHSILNPPT |
| hrv-13 | PDGEDMSLFC QMVSSVTFIP PMADLPDKGK PFDSRFVLCS TNHSLLAPPT |
| hrv-13-f03 | PDGEDMSLFC QMVSSVTFIP PMADLPDKGK PFDSRFVLCS TNHSLLAPPT |
| dq473493-15 | PGGEDMSLFC QMVSSVTFIP PMADLPDKGK PFDSRFVFCS TNHSLLAPPT |
| 124917-16 | PGGEDMTLFC QMVSSVTFIP PMADLPDKGK PFDSRFVLCS TNHSLLAPPT |
| hrv-18 | PSGDDMTLFC QMVSSVTFIP PMADLPDKGK PFDSRFVLCS TNHNLLAPPT |
| hrv-19 | PDGEDMSLFC QMVSSVTFIP PMADLPDKGK PFDSRFVFCS TNHSLLAPPT |
| hrv-20 | PSGEDMSLFC QMVSSVPFIP PMADLPDKGK PFSSDYVLAS TNHTLLHPPT |
| hrv-21 | PSGDDMTLFC QMVSSVTFIP PMADLPDKGK PFDSRFVLCS TNHSLLTPPT |
| hrv-22 | PDGEDMSLFC QMVSSVTFIP PMADLPDKGK PFDSRFVFCS TNHSLLAPPT |
| dq473497-23 | PTGDDMTLFC QMVSSVTFIP PMADLPDKGK AFDSRFVLCS TNHSLLAPPT |
| hrv-24 | PSGEDMTLFC QMVSSVTFIP PMADLPDKGK PFDSRFVLCS TNHGMLAPPT |
| ef173416-24 | PSGEDMTLFC QMVSSVTFIP PMADLPDKGK PFDSRFVLCS TNHGMLAPPT |
| hrv-25 | PSGEDMTLFC QMVSSVTFIP PMADLPDKGK PFDSRFVLCS TNHNMLAPPT |
| dq473508-28 | PSGEDMSLFC QMVSSVPFIP PMADLPDKGK PFSSDYVLAS TNHTLLHPPT |
| hrv-29 | PSGDDMTLFC QMVSSVTFIP PMADLPDKGK PFDSRFVLCS TNHNMLAPPT |
| dq473512-30 | PAGDDMTLFC QMVSSVTFIP PMADLPDKGK TFDSRFVLCS TNHSLLAPPT |
| hrv-30 | PAGDDMTLFC QMVSSVTFIP PMADLPDKGK AFDSRFVLCS TNHSLLAPPT |
| hrv-31 | PSGEDMTLFC QMVSSVTFIP PMADLPDKGK PFDSRFVLCS TNHNLLAPPT |
| hrv-32 | PGGEDMSLFC QMVSSVTFIP PMADLPDKGK PFDSRFVFCS TNHSLLAPPT |
| hrv-33 | PSGDDMTLFC QMVSSVTFIP PMADLPDKGK PFDSRFVLCS TNHSMLAPPT |
| hrv-34 | PSGDDMTLFC QMVSSVTFIP PMADLPDKGK PFDSRFVLCS TNHNLLAPPT |
| dq473501-34 | PSGDDMTLFC QMVSSVTFIP PMADLPDKGK PFDSRFVLCS TNHNLLAPPT |
| dq473505-36 | PSGEDMTLFC QMVSSVPFIP PMADLPDKGK PFTSKFVLAS TNHTMLTPPT |
| hrv-38 | PDGEDMSLFC QMVSSVTFIP PMADLPDKGK PFDSRFVFCS TNQSLLAPPT |
| dq473495-38 | PDGEDMSLFC QMVSSVTFIP PMADLPDKGK PFDSRFVFCS TNQSLLAPPT |
| ay751783-39 | PTGEDMTLFC QMVSSVTFIP PMADLPDKGK AFDSRFVLCS TNHSLLAPPT |
| hrv-40 | PSGDDMTLFC QMVSSVTFIP PMADLPDKGK PFDSRFVLCS TNHNLLAPPT |
| dq473491-41 | PDGEDMSLFC QMVSSVTFIP PMADLPDKGK PFDSRFVLCS TNHSLLAPPT |
| hrv-43 | PDGEDMSLFC QMVSSVTFIP PMADLPDKGK PFDSRFVFCS TNQTLLAPPT |
| dq473499-44 | PSGDDMTLFC QMVSSVTFIP PMADLPDKGK PFDSRFVLCS TNHNMLAPPT |
| hrv-45 | PDGEDMSTFC QMVSSVNYVV PMADLPDKGT LFSSDYVFCS TNQHVLIPPT |
| dq473506-46 | PSGEDMSLFC QMVSSVPFIP PMADLPDKGK PFSSDYVLAS TNHTLLHPPT |
| hrv-47 | PSGEDMTLFC QMVSSVTFIP PMADLPDKGK PFDSRFVLCS TNHNLLAPPT |
| dq473496-49 | PAGDDMTLFC QMVSSVTFIP PMADLPDKGK AFDSRFVLCS TNHSLLAPPT |
| hrv-49-f04 | PAGDDMTLFC QMVSSVTFIP PMADLPDKGK AFDSRFVLCS TNHSLLAPPT |
| hrv-50 | PSGDDMTLFC QMVSSVTFIP PMADLPDKGK PFDSRFVLCS TNHSLLAPPT |
| hrv-51 | PNGEDMSLFC QMVSSVPFIP PMADLPDKGK PFSSDYVLAS TNHNLLHPPT |
| dq473507-53 | PSGEDMSLFC QMVSSVPFIP PMADLPDKGK PFSSDYVLAS TNHTLLHPPT |
| hrv-54 | PSGDDMTLFC QMVSSVTFIP PMADLPDKGK PFDSRFVLCS TNHNLLAPPT |
| hrv-54-f05 | PSGDDMTLFC QMVSSVTFIP PMADLPDKGK PFDSRFVLCS TNHNLLAPPT |
| dq473511-55 | PSGDDMTLFC QMVSSVTFIP PMADLPDKGK PFDSRFVLCS TNHSMLAPPT |
| hrv-56 | PSGEDMTLFC QMVSSVTFIP PMADLPDKGK PFDSRFVLCS TNHNLLAPPT |
| hrv-57 | PSGEDMTLFC QMVSSVTFIP PMADLPDKGK PFDSRFVLCS TNHSMLAPPT |
| hrv-58 | PNGEDMTLFC QMVSSVPFIP PMADLPDKGK PFTSKFVLAS TNHTLLTPPT |
| dq473500-59 | PSGDDMTLFC QMVSSVTFIP PMADLPDKGK PFDSRFVLCS TNHNMLAPPT |
| hrv-60 | PDGEDMSLFC QMVSSVAFIP PMADLPDKGK PFDSRFVFCS TNQSLLAPPT |
| hrv-61 | PDGEDMALFC QMVSSVTFIP PMADLPDKGK PFDSRFVLCS TNHSMLAPPT |
| hrv-62 | PSGEDMTLFC QMVSSVTFIP PMADLPDKGK PFDSRFVLCS TNHNMLAPPT |
| hrv-63 | PSGEDMTLFC QMVSSVTFIP PMADLPDKGK PFDSRFVLCS TNHNMLAPPT |
| hrv-64 | PDGEDMSLFC QMVSSVTFIP PMADLPDKGK PFDSRFVFCS TNHSLLAPPT |
| ef173417-64 | PDGEDMSLFC QMVSSVTFIP PMADLPDKGK PFDSRFVFCS TNHSLLAPPT |
| hrv-65 | PNGEDMSLFC QMVSSVPFIP PMADLPDKGK PFSSDYVLAS TNHNLLHPPT |
| hrv-66 | PSGDDMTLFC QMVSSVTFIP PMADLPDKGK PFDSKFVLCS TNHHLLAPPT |
| hrv-67 | PGGEDMSLFC QMVSSVTFIP PMADLPDKGK PFDSRFVFCS TNHSLLAPPT |
| hrv-68 | PSGEDMSLFC QMVSSVPFIP PMADLPDKGK PFSSDYVLAS TNHTLLHPPT |
| hrv-71 | PNGEDMSLFC QMVSSVPFIP PMADLPDKGK PFSSDYVLAS TNHSLLHPPT |
| dq473492-73 | PDGEDMSLFC QMVSSVTFIP PMADLPDKGK PFDSRFVLCS TNHSLLAPPT |
| dq473494-74 | PGGEDMSLFC QMVSSVTFIP PMADLPDKGK PFDSRFVFCS TNHSLLAPPT |
| dq473510-75 | PDGEDMSLFC QMVSSVTFIP PMADLPDKGK PFDSRFVFCS TNQTLLAPPT |
| dq473502-76 | PSGEDMTLFC QMVSSVTFIP PMADLPDKGK PFDSRFVLCS TNHSMLAPPT |
| hrv-76 | PSGEDMTLFC QMVSSVTFIP PMADLPDKGK PFDSRFVLCS TNHSMLAPPT |
| hrv-77 | PSGDDMTLFC QMVSSVTFIP PMADLPDKGK PFDSRFVLCS TNHHLLAPPT |
| hrv-78 | PDGEDMSLFC QMVSSVPFIP PMADLPDKGK PFSSRYVLCS TNHTILTPPT |
| ef173418-78 | PDGEDMSLFC QMVSSVPFIP PMADLPDKGK PFSSRYVLCS TNHTILTPPT |
| hrv-80 | PSGEDMSLFC QMVSSVPFIP PMADLPDKGK PFSSDFVLAS TNHTLLHPPT |
| hrv-81 | PGGEDMTLFC QMVSSVTFIP PMADLPDKGK PFDSRFVLCS TNHSLLAPPT |
| hrv-81-f06 | PGGEDMTLFC QMVSSVTFIP PMADLPDKGK PFDSRFVLCS TNHSLLAPPT |
| hrv-81-f07 | PGGEDMTLFC QMVSSVTFIP PMADLPDKGK PFDSRFVLCS TNHSLLAPPT |
| hrv-82 | PDGEDMSLFC QMVSSVTFIP PMADLPDKGK PFDSRFVFCS TNQSLLAPPT |
| dq473509-82 | PDGEDMSLFC QMVSSVTFIP PMADLPDKGK PFDSRFVFCS TNQSLLAPPT |
| hrv-85 | PSGDDMTLFC QMVSSVTFIP PMADLPDKGK PFDSRFVLCS TNHNLLAPPT |
| pico-85 | PSGDDMTLFC QMVSSVTFIP PMADLPDKGK PFDSRFVLCS TNHNLLAPPT |
| dq473504-88 | PNGEDMTLFC QMVSSVPFIP PMADLPDKGK PFTSKFVLAS TNHTLLTPPT |
| a10937-89 | PSGEDMTLFC QMVSSVPFIP PMADLPDKGK PFTSKFVLAS TNHTLLTPPT |
| hrv-89 | PSGEDMTLFC QMVSSVPFIP PMADLPDKGK PFTSKFVLAS TNHTLLTPPT |
| hrv-89-f08 | PSGEDMTLFC QMVSSVPFIP PMADLPDKGK PFTSKFVLAS TNHTLLTPPT |
| hrv-89-f09 | PSGEDMTLFC QMVSSVPFIP PMADLPDKGK PFTSKFVLAS TNHTLLTPPT |
| m16248-89 | PSGEDMTLFC QMVSSVPFIP PMADLPDKGK PFTSKFVLAS TNHTLLTPPT |
| hrv-90 | PSGEDMTLFC QMVSSVTFIP PMADLPDKGK SFDSRFVLCS TNHGMLAPPT |
| hrv-94 | PDGEDMSLFC QMVSSVTFIP PMADLPDKGK PFDSRFVFCS TNHSLLTPPT |
| ef173419-94 | PDGEDMSLFC QMVSSVTFIP PMADLPDKGK PFDSRFVFCS TNHSLLTPPT |
| hrv-95 | PNGEDMSTFC QMVSSVNYVV PMADLPDKGT LFSSDYVFCS TNQHILTPPT |
| hrv-96 | PDGEDMSLFC QMVSSVTFIP PMADLPDKGK PFDSRFVLCS TNHSLLAPPT |
| hrv-98 | PSGDDMTLFC QMVSSVTFIP PMADLPDKGK PFDSRFVLCS TNHNLLAPPT |
| hrv-100 | PSGDDMTLFC QMVSSVTFIP PMADLPDKGK PFDSRFVLCS TNHNLLAPPT |
| ef186077-qpm | PDGKDLSLFC QMVSSTEFIT PMANLEDKGR AFTSDYVIAS TNMSVLTPPT |
| ef077279-nat001 | PDGRDLSLFC QMVSSTEFIT PMANLEDKGR AFTSDYVIAS TNMSILTPPT |
| ny1078 | PDGKDLSFFC QMVSSTEFIT PMANLEDKGR AFTSDYVIAS TNMTVLTPPT |
| ef582385-c024 | PDGKDLSMFC QMVSTTNFIP PMAALEDKGK TFTSKYILAS TNLLNLQPPT |
| ef077280-nat045 | PDGEDMNMFC QMVSTADFHV PMAAIEDKGK SFTSKYVLAS TNMAALQPPT |
| ef582387-c026 | PDGKDLSLFC QMVSSTEFIT PMANLEDKGR AFTSDYVIAS TNMTVLTPPT |
| ef582386-c025 | PDGQDLAMFC QMVSTTDFIV PMAALEDKGK SFTSDYVLAS TNLNQLSPPT |
| dq473485-03 | PDGQDISMFC QMVSSVDFLP PMASLDNKGM LFTSNFVLAS TNSNTLSPPT |
| ef173422-03 | PDGQDISMFC QMVSSVDFLP PMASLDNKGM LFTSNFVLAS TNSNTLSPPT |
| dq473490-04 | PNGEDISTFC QMVSSVDFIP PMANLDNKGM LFTSSFVLAS TNSQTLNPPT |
| hrv-05 | PNGEDISTFC QMVSSVDFIP PMANLDNKGM LFTSNFVLAS TNSQTLNPPT |
| dq473486-06 | PDGQDISMFC QMVSTVDFIP PMANLDNKGM LFTSNFVLAS TNSNTLSPPT |
| 105355-14 | PDGQDISMFC QMVSSVDFLP PMASLDNKGM LFTSNFVLAS TNSNTLSPPT |
| k02121-14 | PDGQDISMFC QMVSSVDFLP PMASLDNKGM LFTSNFVLAS TNSNTLSPPT |
| ef173420-17 | PDGQDISMFC QMVSSVDFIP PMASLDNKGI SFTSNFVLAS TNSNTLSPPT |
| hrv-26 | PNGEDISTFC QMVSSVDFIP PMANLDNKGM LFTSNFVLAS TNSQTLNPPT |
| hrv-27 | PNGEDISTFC QMVSSVDFIP PMANLDNKGM LFTSSFVLAS TNSQTLNPPT |
| ef173421-27 | PNGEDISTFC QMVSSVDFIP PMANLDNKGM LFTSSFVLAS TNSQTLNPPT |
| dq473487-35 | PDGQDISMFC QMVSSVDFLP PMASLDNKGM LFTSNFVLAS TNSNTLSPPT |
| hrv-35 | PDGQDISMFC QMVSSVDFLP PMASLDNKGM LFTSNFVLAS TNSNTLSPPT |
| ef173423-37 | PDGQDISMFC QMVSSVDFIP PMANLDNKGM LFTSNFVLAS TNSNTLSPPT |
| hrv-42 | PNGEDISTFC QMVSSVDFIP PMANLDNKGM LFTSNFVLAS TNSQTLNPPT |
| dq473488-48 | PDGQDISMFC QMVSSVDFIP PMASLDNKGI LFTSNFVLAS TNSNTLNPPT |
| hrv-52 | PDGQDISMFC QMVSSVDFIP PMASLDNKGI LFTSNFVLAS TNSNTLSPPT |
| hrv-52-f10 | PDGQDISMFC QMVSSVDFIP PMASLDNKGI LFTSNFVLAS TNSNTLSPPT |
| ef173424-52 | PDGQDISMFC QMVSSVDFIP PMASLDNKGI LFTSNFVLAS TNSNTLSPPT |
| hrv-69 | PDGQDISMFC QMVSSVDFIP PMASLDNKGI LFTSNFVLAS TNSNTLSPPT |
| dq473489-70 | PDGQDVSMFC QMVSSVDFIP PMASLDNKGI LFTSNFVLAS TNSNTLSPPT |
| hrv-72 | PDGQDISMFC QMVSSVDFLP PMASLDNKGM LFTSNFVLAS TNSNTLSPPT |
| hrv-79 | PDGQDISMFC QMVSSVDFLP PMASLDNKGM LFTSNFVLAS TNSNTLSPPT |
| hrv-83 | PDGQDISMFC QMVSSVDFLP PMASLDNKGM LFTSNFVLAS TNSNTLSPPT |
| hrv-84 | PNGEDISTFC QMVSXVDFVP PMANLDNKGM LFTSSFVLAS TNSQTLNPPT |
| hrv-86 | PDGQDISMFC QMVSSVDFLP PMASLDNKGM LFTSNFVLAS TNSNTLSPPT |
| hrv-91 | PDGQDISMFC QMVSXVDFIP PMASLDNKGI LFTSNFVLAS TNSNTLSPPT |
| hrv-92 | PDGQDISMFC QMVSSVDFIP PMASLDNKGM LFTSNFVLAS TNSNTLSPPT |
| ef173425-93 | PNGEDISTFC QMVSSVDFIP PMANLDNKGM LFTSSFVLAS TNSQTLNPPT |
| hrv-97 | PNGEDVSTFC QMVSSVDFIP PMANLDNKGM LFTSSFVLAS TNSQTLNPPT |
| hrv-99 | PNGEDISTFC QMVSSVDFIP PMANLDNKGM LFTSNYVLAS TNSQTLNPPT |
| | 1401 1450 |
| annotation | .......... .......... .......... .......... .......... |
| af499637-cva13 | VAHSDALSRR FAFDMEICPL TQY.TIKGKL NMAEATRLCK DCPQPANFKK |
| af546702-cva21 | VAHSDALTRR FAFDVEVYTM SEH.SVKGKL NMATATQLCK DCPTPANFKK |
| v01149-pv1m | VAHSDALARR FAFDMDIQVM NEY.SRDGKL NMAMATEMCK NCHQPANFKR |
| d00239-01 | ISSLPAMNRR FFFDLDIVVH DNYKDAQGKL NVSKAFQPCN VNTKIGN.AK |
| pico-01 | ISSLPAMNRR FFFDLDIVVH DNYKDTQGKL DVSKAFRPCN VNTKIGN.AK |
| hrv-01 | ISSLPAMNRR FFFDLDIVVH DNYKDTQGKL DVSKAFRPCN VNTKIGN.AK |
| x02316-02 | ITSLPAMNRR FFLDLDIIVH DNFKDPQGKL NVAAAFRPCD VDNRIGN.AR |
| hrv-07 | VSSLPAMSRR FYFDLDIQVK KDY.LVDGKL DIAKSFKPCD VNNKIGN.AK |
| dq473503-07 | VSSLPAMSRR FYFDLDIQVK KDY.LVDGKL DIAKSFKPCD VNNKIGN.AK |
| hrv-08 | ISTLPALNRR LFLDLTIKVN PKY.LESGKL NLDCALKACD QEQKIGN.AR |
| pico-09 | ITSLSAMNRR FYLDLDIVVN ENFRDSQGKL NVPKSFKPCD IDNKIGN.AK |
| hrv-09 | ITSLSAMNRR FYLDLDIVVN ENFRDSQGKL DVSKSFRPCD IDNKIGN.AK |
| hrv-09-f01 | ITSLSAMNRR FFLDLDIIVN ENFRDSQGKL DVPKSFKPCD IDNKIGN.AK |
| hrv-09-f02 | ITSLSAMNRR FFLDLDIIVN ENFRDSQGKL DVPKSFKPCD IDNKIGN.AK |
| dq473498-10 | ITSLPAMNRR FFFDLDIIVC EKYKDPQGKL NVTAAFRPCD VDAKIGN.AR |
| hrv-10 | ITSLPAMNRR FFFDLDIIVC EKYKDPQGKL NVTAAFRPCD VDAKIGN.AR |
| ef173414-11 | ITSLPAMNRR FFLDLDIVVN EKYKDLQGKL NVTAAFQPCD VNVRIGN.AR |
| ef173415-12 | ITSTTAMNRR FYLDLDIVVH PRFQINQGKL NLVAALKPCD .TGKVGN.AT |
| hrv-13 | ITSLQAMNRR FFLDLDIVVN DNYKDAQGKL DVSKAFRPCD VKTKIGN.AR |
| hrv-13-f03 | ITSLQAMNRR FFLDLDIVVH DNYKDAQGKL DVSKAFKPCD IDTKIGN.AR |
| dq473493-15 | ITSLSAMNRR FFLDLDIVIH DNYKDNQGKL DVSKSFKPCD VDNKIGN.AK |
| 124917-16 | ISSLPAMNRR FYLDLDILVH DNYKDNQGKL DVSRAFRLCD VDSKIGN.AK |
| hrv-18 | ITSLPAMNRR FFLDLDIIVC DKYKDSQGKL NVSAAFQLCD VNTKVGN.AR |
| hrv-19 | ITSLSAMNRR FYLDLDIIVH DNYKDGQGKL DVPKSFKPCD VDSKIGN.AK |
| hrv-20 | ISCTTAMNRR FFLDLDIIVK DDYKLGHGKL NLQCALKPCN .VGKIGN.AK |
| hrv-21 | ITSLPAMNRR FFMDLDIIVC DKYKDAQGKL NVSAAFKPCD VDTKIGN.AR |
| hrv-22 | ITSLSAMNRR FFLDLDIVVH XXYKDNLGKL DVPKSFRPCD VDNKIGN.AK |
| dq473497-23 | ITSLPAMNRR FFFDLDIIVH DNFKDSQGKL NVAAAFKPCD VDIKIGN.AR |
| hrv-24 | ITSLPAMNRR FFLDLDIVVN GKYKDSQGKL NVSAAFRPCD VDAKIGN.AR |
| ef173416-24 | ITSLPAMNRR FFLDLDIVVN GKYKDSQGKL NVSAAFRPCD VDAKIGN.AR |
| hrv-25 | ITSLPAMNRR FFFDLDIVVC DKYKDPQGKL NVSAAFRPCD IDTKIGN.AR |
| dq473508-28 | ITCTTAMNRR FFLDLDIVVK DEYKLSQGKL NLQCALKPCN .VGKIGN.AK |
| hrv-29 | ITSLPAMNRR FFFDLDIVVC DKYKDSQGKL NVSAAFQPCD VDIKIGN.AR |
| dq473512-30 | ITSLPAMNRR FFLDLDIIVH DRFKDPQGKL NVAAAFRPCD VDNKIGN.AR |
| hrv-30 | ITSLPAMNRR FFLDLDIIVH DRFKDPQGKL NVAAAFRPCD VDNKIGN.AR |
| hrv-31 | ITSLPAMNRR FFLDLDIXVC DKYKDPQGKL NVAAAFRPCD VDTKIGN.AR |
| hrv-32 | ITSLSAMNRR FYLDLDIVVN ENYKDTQGKL XVPKSFKPCD IDNKIGN.AK |
| hrv-33 | ITSLPAMNRR FYLDLDIVVS EKYKDQQGKL NVAAAFQPCD VNAKIGN.AR |
| hrv-34 | ITSLPAMNRR FFLDLDIVVC EKYKDSQGKL NVSAAFRPCD VNTKIGN.AR |
| dq473501-34 | ITSLPAMNRR FFLDLDIVVC EKYKDSQGKL NVSAAFRPCD VNTKIGN.AR |
| dq473505-36 | VSSLPAMSRR FYFDLDIQVK KDY.LLDGKL DIAKSFRPCD VNTKIGN.AK |
| hrv-38 | ITSLSAMNRR FFLDLDITVH DNYKDNQGKL NVPKSFKPCD VDNKIGN.AK |
| dq473495-38 | ITSLSAMNRR FFLDLDITVH DNYKDNQGKL NVPKSFKPCD VDNKIGN.AK |
| ay751783-39 | ITSLPAMNRR FFLDLDIIVH DNYKDAQGKL NVAAAFRPCD VNTKIGN.AR |
| hrv-40 | ITSLPAMNRR FFLDLDIIVC DKYKVAQGKL NVSAAFKPCD VNTKIGN.AK |
| dq473491-41 | ITSLQAMNRR FFLDLDIVVH ENYKDAQGKL DVSRAFKPCD VDTKIGN.AR |
| hrv-43 | ITSLPAMNRR FFLDLDIVVH DNYKDAQDKL NVPKAFKPCD VDNKIGN.AR |
| dq473499-44 | ITSLPAMNRR FFFDLDIVVC DKYKDSQGKL NVSAAFQPCD VDVKIGN.AR |
| hrv-45 | ISTIPALNRR LFFDLTVKVN PRY.QEAGKL NLDCALKPCN HELKVGN.AR |
| dq473506-46 | ITCTTAMNRR FFLDLDIIVK DEYKLNQGKL NLQCALRPCK .EGKIGN.AK |
| hrv-47 | ITSLPAMNRR FFLDLDIVVC DKYKDPQGKL NVAAAFQPCD VNTKIGN.AR |
| dq473496-49 | ITSLPAMNRR FFLDLDIIVH DNFKDSQGKL NVAAAFQPCN VDNKIGN.AR |
| hrv-49-f04 | ITSLPAMNRR FFLDLDILVH DNFKDSQGKL NVAAAFQPCD VDNKIGN.AR |
| hrv-50 | IXSLPAMNRR FFLDLDIIVC DKYKDSQGKL NVSAAFQPCD VNTKIGN.AR |
| hrv-51 | ITCTTAMNRR FFLDLDIVVK DVFKINQGRL NLQCALKPCK .EGKVGN.AK |
| dq473507-53 | ITCTTAMNRR FFLDLDIIVK DDYKLGQGKL NLQCALKPCK .EGKIGN.AK |
| hrv-54 | ITSLPAMNRR FFLDLDIVVC DKYKDSQGKL NVSAAFKPCD VNTKIGN.AK |
| hrv-54-f05 | ITSLPAMNRR FFLDLDIVVC DKYKDSQGKL NVSAAFKPCD VNTKIGN.AK |
| dq473511-55 | ITSLPAMNRR FFMDLDIIVN DKYKDSQGKL NVSAAFKPCD VDVKIGS.AR |
| hrv-56 | ITSLPAMNRR FFFDLDIIVC DKYKDPQGKL NVSAAFQPCD VDTKIGN.AR |
| hrv-57 | ITSLPAMNRR FFMDLDIIVN DKYKDAQGKL NVSAAFKPCD VDTKIGN.AR |
| hrv-58 | VSSLPAMSRR FYFDLDIQVK KDY.LLDGKL DIAKSFRLCD INTKIGN.AR |
| dq473500-59 | ITSLPAMNRR FYLDLDIIVN DRYKDPQGKL NVSAAFQPCD VDAKVGN.AR |
| hrv-60 | ITSLSAMNRR FYLDLDITVH DNYKDNLGKL DVPKAFKPCD VDTKIGN.AK |
| hrv-61 | ITSLQAMNRR FFLDLDIVVH DNYKDSQGKL NVSKAFKPCD VGTKIGN.AR |
| hrv-62 | ITSLPAMNRR FFFDLDIVVC DKYKDSQGKL NVSAAFRPCD IDTKIGN.AR |
| hrv-63 | ITSLPAMNRR FFLDLDIVVN DRYKDSQGKL NVSAAFQPCD VNAKVGN.AR |
| hrv-64 | ITSLSAMNRR FFLDLDIVVH ERYKDNQGKL DVPKSFKPCD VDNKIGN.AK |
| ef173417-64 | ITSLSAMNRR FFLDLDIVVH ERYKDNQGKL DVPKSFKPCD VDNKIGN.AK |
| hrv-65 | ITCTTAMNRR FFLDLDIVVK EVFKINQGRL NLQCALKPCK .DGKIGN.AR |
| hrv-66 | ITSLPAMNRR FFLDLDIVVC DKYKDSQGKL NVSAAFRPCD VNTKIGN.AR |
| hrv-67 | ITSLSAMNRR FYLDLDIVVN ENYRDTQGKL NVPKSFKPCD IDNKIGN.AK |
| hrv-68 | ITCTTAMNRR FFLDLDIVVK DKYKLSQGKL NLQCALKPCN .EGKIGN.AX |
| hrv-71 | ITCTPAMNRR FFLDLDIIVK DDYKINQGKL NLQCALKPCK .VGKVGN.AK |
| dq473492-73 | ITSLQAMNRR FFLDLDIVVH DNYKDTQGKL DVSKAFKPCD VGTKIGN.AR |
| dq473494-74 | ITSLSAMNRR FFLDLDIVVH DNYRDNQGKL YVPKSFKPCD IDNKIGN.AK |
| dq473510-75 | ITSLPAMNRR FFLDLDIVVH DNYKDIQGKL DVPKAFKLCD IDTKVGN.AR |
| dq473502-76 | ITSLPAMNRR FYLDLDIVVS EKYKDQQGKL NVAAAFQPCD VNVKIGN.AR |
| hrv-76 | ITSLPAMNRR FYLDLDIVVS EKYKDQQGKL NVAAAFQPCD VNVKIGN.AR |
| hrv-77 | ITSLPAMNRR FFLDLDIVVC DKYKDSQGKL NVSAAFQLCD VNTKVGN.AR |
| hrv-78 | ISSLPAMNRR FFLDLDIEVS ENYKDGNGRI QLDCALKPCN DNIKIGN.AK |
| ef173418-78 | ISSLPAMNRR FFLDLDIEVS ENYKDGNGRI QLDCALKPCN DNIKIGN.AK |
| hrv-80 | ITCTTAMNRR FFLDLDITVK EEYKIQQGKL NLRCALKPCK .EGKVGN.AK |
| hrv-81 | ISSLPAMNRR FYLDLDITVH DNFKDNQGKL DVSRAFQPCD TNLKIGN.AK |
| hrv-81-f06 | ISSLPAMNRR FYLDLDITVH DNFKDNQGKL DVSRAFQPCD TNLKIGN.AK |
| hrv-81-f07 | ISSLPAMNRR FYLDLDITVH DNFKDNQGKL DVSRAFQPCD TNLKIGN.AK |
| hrv-82 | ITSLSAMNRR FYLDLDIIVH ENYKNTQGKL DVSRSFKPCD VDTKIGN.AK |
| dq473509-82 | ITSLSAMNRR FYLDLDIIVH ENYKNAQGKL DVSRSFKPCD VDTKIGN.AK |
| hrv-85 | ITSLPAMNRR FFLDLDIIVC DKYKDAQGKL NVCAAFKPCD IDTKIGN.AK |
| pico-85 | ITSLPAMNRR FFLDLDIIVC DKYKDAQGKL NVCAAFKPCD IDTKIGN.AK |
| dq473504-88 | VSSLPAMSRR FYFDLDIQVK KEY.LMGGKL DIAKSFRPCD VDIKIGN.AK |
| a10937-89 | VSSLPAMARR FYFDLDIQVK KEY.LLDGKL DIAKSFRPCD VNIKIGN.AK |
| hrv-89 | VSSLPAMARR FYFDLDIQVK KEY.LLDGKL DIAKSFRPCD VNTKIGN.AK |
| hrv-89-f08 | VSSLPAMARR FYFDLDIQVK KEY.LLDGKL DIAKSFRPCD VNTKIGN.AK |
| hrv-89-f09 | VSSLPAMARR FYFDLDIQVK KEY.LLDGKL DIAKSFRPCD VNTKIGN.AK |
| m16248-89 | VSSLPAMARR FYFDLDIQVK KEY.LLDGKL DIAKSFRPCD VNIKIGN.AK |
| hrv-90 | ITSLPAMNRR FFLDLDIVVN DKYKDSQGKL NVSAAFQPCD VDAKIGN.AR |
| hrv-94 | ITSLSAMNRR FFLDLDIVVH ERYKDNQGKL DVPKSFKPCD VDNKIGN.AK |
| ef173419-94 | ITSLSAMNRR FFLDLDIVVH ERYKDNQGKL DVPKSFKPCD VDNKIGN.AK |
| hrv-95 | ISTLPALNRR LFLDLTIKVN PKY.LESGKL NLDCALKACD QEQKIGN.AR |
| hrv-96 | ITSLQAMNRR FFLDLDIVVH DNYKDAQGKL DVSKAFKPCD VXAKIGN.AR |
| hrv-98 | ITSLPAMNRR FFLDLDIIVC DKYKDSQGKL NVSAAFKPCD VDTKIGN.AK |
| hrv-100 | ITSLPAMNRR FFLDLDIIVC DKYKDSQGKL NVSAAFKPCD VDAKIGN.AR |
| ef186077-qpm | VSSPEAIDRR FFLDCDVKIM PAY.NTNNLL NVAKALLPCT DCPKPEFYKQ |
| ef077279-nat001 | VSTPEAIDRR FFLDCDVKIM PAY.NTNNLL NVAKALLPCT DCPKPEFYKQ |
| ny1078 | VSSPEAIDRR FFLDCDVKIM PAY.NTNNLL NVAKALLPCT DCPKPEFYKQ |
| ef582385-c024 | VTVPEAIDRR FYLDLDLKIL QGYQNQVGLL DTAKALQPCA NCSKPPHYKQ |
| ef077280-nat045 | IQTPEALERR FFLDMDVKVL SPYSSQRGLL DTAKALQPCT KCDKPTHYSR |
| ef582387-c026 | VSSPEAIDRR FFLDCDVKIM PAY.NTNNLL NVAKALLPCT DCPKPEFYKQ |
| ef582386-c025 | ITIPEAITRR FFLDVDLKIM PGYKTHAGLL DTAKALQACS DCAKPLHYKQ |
| dq473485-03 | ILNPEALIRR FGFDLDICMH STY.TKNGKL NAAMATSLCK DCHQPSNFKK |
| ef173422-03 | ILNPEALIRR FGFDLDICLH STY.TKNGKL NAAMATSLCK DCHQPSNFKK |
| dq473490-04 | ILNPEALARR FGFDLDMCLH TTF.TRSGKL NAALASELCK DCHKPANFKK |
| hrv-05 | VLNPEALARR FGFDLDMCLH TTY.TKSGKL NTALASELCK DCHKPTNFKR |
| dq473486-06 | ILNPEALARR FGFDLDICLH STY.TKNGKL NATMSTSLCK DCHQPANFKK |
| 105355-14 | ILNPEALVRR FGFDLDICLH TTY.TKNGKL NAGMSTKTCK DCHQPSNFKK |
| k02121-14 | ILNPEALVRR FGFDLDICLH TTY.TKNGKL NAGMSTKTCK DCHQPSNFKK |
| ef173420-17 | ILNPEALARR FGFDLDICLH TTY.TKSGKL NVAMATELCK DCYKPSNFNK |
| hrv-26 | ILNPEALARR FGFDLDMCLH STF.TKSGKL NAALASELCK DCHKPTNFKR |
| hrv-27 | VLNPEALARR FGFDLDMCLH SSF.TKSGKL NTAMACELCK DCHKPTNFKK |
| ef173421-27 | VLNPEALARR FGFDLDMCLH SSF.TKSGKL NTAMACELCK DCHKPTNFKK |
| dq473487-35 | ILNPEALARR FGFDLDICLH STY.TKNGKL NVTMATSICK DCHQPSNFKK |
| hrv-35 | ILNPEALARR FGFDLDICLH STY.TKNGKL NVTMATSICK DCHQPSNFKK |
| ef173423-37 | ILNPEALARR FGFDLDICLH STY.TKNGKL NTTMSTSICK DCHQPSNFKK |
| hrv-42 | VLNPEALARR FGFDLDMCLH TTY.TKSGKL NAALASELCK DCHKPTNFKR |
| dq473488-48 | ILNPEALARR FGFDLDICLH TTY.TKSGKL NAAMATELCK DCHKPSNFNK |
| hrv-52 | ILNPEALARR FGFDLDICLH TTY.TKSGKL NAAMATELCK DCHKPSNFSK |
| hrv-52-f10 | ILNPEALARR FGFDLDICLH TTY.TKSGKL NVAMATELCK DCHKPSNFSR |
| ef173424-52 | ILNPEALARR FGFDLDICLH TTY.TKSGKL NAAMATELCK DCHKPSNFSK |
| hrv-69 | ILNPEALVRR FGFDLDICLH TSF.TKSGKL NVAMATELCK DCHKPSNFNR |
| dq473489-70 | ILNPEALARR FGFDLDICLH TTY.TKSGKL NAAMATELCK DCHKPSNFNK |
| hrv-72 | ILNPDALARR FGFDLDICLH STY.TKNGKL NAAMATRVCK DCHQPTNFKK |
| hrv-79 | ILNPEALVRR FGFDLDICLH TTF.TKNGKL NAAMATSICK DCHQPSNFKK |
| hrv-83 | ILNPEALVRR FGFDLDICLH STY.TKNGKL NAAMATSICK DCHQPSNFKK |
| hrv-84 | VLNPEALARR FGFDLDMCLH SSY.TKSGKL NVAMACELCK DCHTPTNFKK |
| hrv-86 | ILNPEALTRR FGFDLDICLH STY.TKNGKL NASMATSLCK DCHKPSNFKK |
| hrv-91 | ILNPEALVRR FGFDLDICLH TTY.TKSGKL NAAMATELCK DCHKPSNFNK |
| hrv-92 | ILNPEALARR FGFDLDICLH STY.TKNGKL NAAMVTTICK DCHQPTNFKK |
| ef173425-93 | VLNPEALARR FGFDLDMCLH SSF.TKSGKL NAAMACELCK DCHKPTNFKK |
| hrv-97 | VLNPEALARR FGFDLDMCLH SSF.TKSGKL NAAMACELCK DCHKPTNFKK |
| hrv-99 | ILNPEALARR FGFDLDMCLH TTY.TRSGKL NAALASELCK DCHKPTNFKR |
| | 1451 1500 |
| annotation | .......... .......... .......... .......... ........QG |
| af499637-cva13 | CCPLVCGKAI QLMDKYSRQR FSVDEITTLV INEKNRRANI GNCMEALFQG |
| af546702-cva21 | CCPLVCGKAL QLMDRYTRQR FTVDEITTLI MNEKNRRANI GNCMEALFQG |
| v01149-pv1m | CCPLVCGKAI QLMDKSSRVR YSIDQITTMI INERNRRSNI GNCMEALFQG |
| d00239-01 | CCPFVCGKAV SFKDRSTCST YTLAQVYNHI LEEDKRRRQV VDVMSAIFQG |
| pico-01 | CCPFVCGKAV TFKDRSTCST YTLAQVYNHI LEEDKRRRQV VDVMSAIFQG |
| hrv-01 | CCPFVCGKAV XFKDRSTCST YTLAQVYNHI LEEDKRRRQV VDVMSAIFQG |
| x02316-02 | CCPFVCGKAV SFKDRNSCNK YSLAQVYNIM IEEDRRRRQV VDVMTAIFQG |
| hrv-07 | CCPFICGKAV EFKDRNTCAV LSLSRLYNHI REEDRRRSSA AQAMEAIFQG |
| dq473503-07 | CCPFICGKAV EFKDRNTCAV LSLSRLYNHI REEDRRRSSA AQAMEAIFQG |
| hrv-08 | CCPLICGKAV SFVNRNNNEE LSLSRVYNQI VHEHNRRLNV SKHMEAIFQG |
| pico-09 | CCPFICGKAV VFKDRNTCQT YTLCQIYNMI IEEDKRRRNV IDVMTAIFQG |
| hrv-09 | CCPFICGKAV VFKDRNTCQT YTLCQIYNMI IEEDKRRRNV IDVMTAIFQG |
| hrv-09-f01 | CCPFICGKAV VFKDRNTCQT YTLCQIYNMI IEEDKRRRNV IDVMTAIFQG |
| hrv-09-f02 | CCPFICGKAV VFKDRNTCQT YTLCQIYNMI IEEDKRRRNV IDVMTAIFQG |
| dq473498-10 | CCPFICGKAV MFRDRNTCQT YTLAQVYNRI LDEDKRRRQV IDVMAAIFQG |
| hrv-10 | CCPFICGKAV MFRDRNTCQT YTLAQVYNRI LDEDKRRRQV IDVMAAIFQG |
| ef173414-11 | CCPFICGKAV MFKDRNTCQS YTLAQVYNRI LDEDKRRRQV VDVMSAIFQG |
| ef173415-12 | CCPLICGKAI TFRDRNTNES YALSTIYNKI VEENKNRKML SKSLEAIFQG |
| hrv-13 | CCPFICGKAV TFKDRNTCQS YPLSQIYNLI LEEDKRRTHV VDVMTAIFQG |
| hrv-13-f03 | CCPFICGKAV TFKDRNTCQS YPLSQIYNLI LQEDKRRTHV VDVMTAIFQG |
| dq473493-15 | CCPFICGKAV TFKDRNNCQA YSLSRIYNMI MEEDKRRRNV VDVMTAIFQG |
| l24917-16 | CCPFVCGKAV TFKDRNTCRT YSLSQIYNQI LEEDKRRRQV VDVMSAIFQG |
| hrv-18 | CCPFICGKAV IFRDRNTCQT YTLSQVYNLI LEEDRKRTRV VDVMAAIFQG |
| hrv-19 | CCPFICGRAV SFKDRNTCRE YSLSQIYNVI MEEDKRRRNV VDVMSAIFQG |
| hrv-20 | CCPLICGKAL QFRDRNTGEH LSLATVYNRI TQESKNRKEL TNSLQAIFQG |
| hrv-21 | CCPFICGKAV MFKDRNTCRT YTLAQIYNQI LEEDKRRRQV IDVMSAIFQG |
| hrv-22 | CCPFICGKAV SFKDRNTCQE YSLSXIYNMI IEEDKRRRNV VDVMTAIFQG |
| dq473497-23 | CCPFVCGKAV SFKDRNSCNK YTLAQIYNIM LEEDRRRRQM VDVMSAIFQG |
| hrv-24 | CCPFICGKAV MFKDRNTCTS YTLSQVYNNI LDEDKRRRQV VDVMSAIFQG |
| ef173416-24 | CCPFICGKAV MFKDRNTCTS YTLSQVYNNI LDEDKRRRQV VDVMSAIFQG |
| hrv-25 | CCPFICGKAV VFRDRNTCQT YTLAQVYNQI LVEDKRRRQV IDVMAAIFQG |
| dq473508-28 | CCPLICGKAL QFKDRNSGDY LSLATVYNRI TQESKNRKDL TNSLQAIFQG |
| hrv-29 | CCPFICGKAV NFRDRNTCQT YTLAQVYNQI LAEDKRRRRV IDVMAAIFQG |
| dq473512-30 | CCPFVCGKAV SFKDRNTCNK YTLAQIYNIM LEEDQRRRQM VDVMSAIFQG |
| hrv-30 | CCPFVCGKAV SFKDRNTCNK YTLAQIYNIM LEEDQRRRQM VDVMSAIFQG |
| hrv-31 | CCPFICGKAV IFRDRNNCQT YTLAQVYNQI LAEDKRRRQV VDVMAAIFQG |
| hrv-32 | CCPFICGKAV VFKDRNTCQT YTLCQIYNMI IEEDKRRRSV VDVMSAIFQG |
| hrv-33 | CCPFICGKAV MFKDRNTCQS YTLAQVYNHI LEEDRRRRQV VDVMSAIFQG |
| hrv-34 | CCPFICGKAV NFRDRNTCQT YTLSQVYNQM LEEDKRRRQV IDVMAAIFQG |
| dq473501-34 | CCPFICGKAV NFRDRNTCQT YTLSQVYNQM LEEDKRRRQV IDVMAAIFQG |
| dq473505-36 | CCPFICGKAV EFKDRNSCTT LSLSQLYNHI KEEDRRRSSA AQAMEAIFQG |
| hrv-38 | CCPFICGKAV SFKDRNTCQT YSLSQIYNMV IEEDKRRRNV VDVMSAIFQG |
| dq473495-38 | CCPFICGKAV SFKDRNTCQT YSLSQIYNMI IEEDKRRRNV VDVMSAIFQG |
| ay751783-39 | CCPFVCGKAV SFKDRNSCNK YTLAQIYNIM LEEDKRRRQV IDVMSAIFQG |
| hrv-40 | CCPFICGKAV IFRDRNTCQT YTLAQVYNLI LDEDKRRRQV IDVMAAIFQG |
| dq473491-41 | CCPFICGKAV TFKDRNTCLN YSLSQIYNLI LEEDKRRTHV VDVMSAIFQG |
| hrv-43 | CCPFICGKAV SFKDRNTCQS YALCQIYNKV LEEDKRRRNV VDVMSAIFQG |
| dq473499-44 | CCPFICGKAV NFRDRNTCQT YTLAQVYNQI LAEDKRRRQV VDVMAAIFQG |
| hrv-45 | CCPLICGKAI TFINRHNNEE LTLSQIYNQV VNEHNRRLNV SKHMEAIFQG |
| dq473506-46 | CCPLICGKAL QFRDRSNGEH LSLATIYNRI THESKNRKEL TNSLQAIFQG |
| hrv-47 | CCPFICGKAV IFRDRNNCQT YTLAQVYNRI LVEDKRRRQV VDVMAAIFQG |
| dq473496-49 | CCPFVCGKAF SFKDRNSCNK YTLAQVYNIM LEEDKRRRQV VDVMSAIFQG |
| hrv-49-f04 | CCPFVCGKAV SFKDRNTCNK YTLAQVYNIM LEEDKRRRQV VDVMSAIFQG |
| hrv-50 | CCPFICGKAV NFRDRNTCQT YTLAQVYNQM LEEDKRRRXV IDVMTAIFQG |
| hrv-51 | CCPLICGKAV VFRDRNTGDY LSLSTIYNRI TEESRNRKEL NTSLQAIFQG |
| dq473507-53 | CCPLICGRAL QFRDRSNGEH LSLATIYNRI TQESKNRKEL TNSLQAIFQG |
| hrv-54 | CCPFICGKAV VFRDRNTCQT YTLSQVYNQI LDEDKRRRQV VDVMAAIFQG |
| hrv-54-f05 | CCPFICGKAV MFRDRNTCQT YTLSQVYNQI LDEDKRRRQV VDVMAAIFQG |
| dq473511-55 | CCPFICGKAV MFKDRNTCHT YALAQVYNQI LDEDKRRRQV IDVMSAIFQG |
| hrv-56 | CCPFICGKAV MFRDRNTCQT YTLAQVYNQI LEEDRRRRQV IDVMAAIFQG |
| hrv-57 | CCPFICGKAV TFKDRNTCXT FSLAQVYNQI LDEDKRRRQV IDVMSAIFQG |
| hrv-58 | CCPFICGKAV EFKDRNTCNV LSLSQLYNHI REEDRRRSSA AQAMEAIFQG |
| dq473500-59 | CCPFICGKAV TFRDRNTCQN YTLSQVYNQM LEEDKRRRQV VDVMAAIFQG |
| hrv-60 | CCPFICGKAV SFKDRNTCQV YPLSQIYNLI IEEDKRRRNV VDVMSAIFQG |
| hrv-61 | CCPFICGKAV TFKDRNTCLS YPLSQIYNLI LQEDKRRTHV VDVMSAIFQG |
| hrv-62 | CCPFICGKAV IFRDRNTCQT YTLAQVYNQI LAEDKRRRQV IDVMAAIFQG |
| hrv-63 | CCPFICGKAV TFRDRNTCQN YTLSQVYNHM LEEDKRRRQV VDVMAAIFQG |
| hrv-64 | CCPFICGKAV SFRDRNTCQE YSLCQIYNII IEEDKRRRNV VDVMTAIFQG |
| ef173417-64 | CCPFICGKAV SFRDRNTCQE YSLCQIYNII IEEDKRRRNV VDVMTAIFQG |
| hrv-65 | CCPLICGKAV VFKDRNTGDY LSLATVYNKI TEENRNRKEL NTSLQAIFQG |
| hrv-66 | CCPFICGKAV VFRDRNTCQT YTLAQVYNLM LEEDRKRTQV IDVMAAIFQG |
| hrv-67 | CCPFICGKAV VFKDRNTCQT YTLCQIYNMI IEEDKRRRNV IDVMTAIFQG |
| hrv-68 | CCPLICGKAL QFRDRNNGDH LSLATIYNRI TQESKNRKDL TNSLQAIFQG |
| hrv-71 | CCPLICGKAV LFRDRNTGEH LSLATIYNKI VEESKNRKEL NTSLQAIFQG |
| dq473492-73 | CCPFICGKAV TFKDRNTCLS YSLSQIYNLI LQEDKRRTHV VDVMTAIFQG |
| dq473494-74 | CCPFICGKAV TFKDRNNCQI YSLSQIYNMI IEEDKRRRNV IDVMTAIFQG |
| dq473510-75 | CCPFICGKAV TFKDRNTCQS YTLSQIYNKI LEEDKRRRNV VDVMIAIFQG |
| dq473502-76 | CCPFICGKAV MFKDRNTCQS YTLAQVYNHI LNEDKRRRQV VDVMSAIFQG |
| hrv-76 | CCPFICGKAV MFKDRNTCQS YTLAQVYNHI LNEDKRRRQV VDVMSAIFQG |
| hrv-77 | CCPFICGKAV VFRDRNTCQT YTLSQVYNLI LEENRKRTQV VDVMAAIFQG |
| hrv-78 | CCPFVCGKAI TFRDRNSCEK YTLARIYHKI LEEDKRRQCL SNALEAVFQG |
| ef173418-78 | CCPFVCGKAI TFRDRNSCEK YTLARIYHKI LEEDKRRQCL SNALEAVFQG |
| hrv-80 | CCPLICGKAL VFRDRNTGEH LSLATIYNRI VEESKNRKEL TNSLQAIFQG |
| hrv-81 | CCPFVCGKAV MFKDRNTCRT YSLSQVYNQI LEEDKRRRQV VDVMSAIFQG |
| hrv-81-f06 | CCPFVCGKAV MFKDRNTCKT YSLSQVYSQI LEEDKRRRQV IDVMSAIFQG |
| hrv-81-f07 | CCPFVCGKAV MFKDRNTCKT YSLSQVYSQI LEEDKRRRQV IDVMSAIFQG |
| hrv-82 | CCPFICGKAV SFKDRNTCEV YSLCRIYNMI MQEDRHRRSV VDVMTAIFQG |
| dq473509-82 | CCPFICGKAV SFKDRNTCEV YSLCQIYNMI MQEDRHRRSV VDVMTAIFQG |
| hrv-85 | CCPFICGKAV IFRDRNTCQT YTLAQVYNLI LDEDKRRRQV IDVMAAIFQG |
| pico-85 | CCPFICGKAV IFRDRNTCQT YTLAQVYNLI LDEDKRRRQV IDVMAAIFQG |
| dq473504-88 | CCPFICGKAV EFKDRNTCAT LSLSQLYNHI REEDRRRSSA ARAMEAIFQG |
| a10937-89 | CCPFICGKAV EFKDRNSCTT LSLSQLYSHI KEEDRRRSSA AQAMEAIFQG |
| hrv-89 | CCPFICGKAV EFKDRNSCTT LSLSQLYSHI KEEDRRRSSA AQAMEAIFQG |
| hrv-89-f08 | CCPFICGKAV EFKDRNSCTT LSLSQLYSHI KEEDRRRSSA AQAMEAIFQG |
| hrv-89-f09 | CCPFICGKAV EFKDRNSCTT LSLSQLYSHI KEEDRRRSSA AQAMEAIFQG |
| m16248-89 | CCPFICGKAV EFKDRNSCTT LSLSQLYSHI KEEDRRRSSA AQAMEAIFQG |
| hrv-90 | CCPFVCGKAV MFKDRNTCXS YTLAQVYNTI LDEDKRRRRV IDVMSAIFQG |
| hrv-94 | CCPFICGXAV SFRDRNTCQE YSLSQIYNMI IEEDKRRRNV VDVMTAIFQG |
| ef173419-94 | CCPFICGKAV SFRDRNTCQE YSLSQIYNMI IEEDKRRRNV VDVMTAIFQG |
| hrv-95 | CCPLICGKAV SFVNRNNNEE LSLSRVYNQI VHEHNRRLNV SKHMEAIFQG |
| hrv-96 | CCPFICGKAV TFKDRNTCLS YPLSQIYNLI LQEDKRRTHV VDVMSAIFQG |
| hrv-98 | CCPFVCGKAV VFRDRNTCQT YTLSQVYNQI LYEDKRRRQV VDVMAAIFQG |
| hrv-100 | CCPFICGKAV VFRDRNTCQS YTLAQVYNQI LVEDKRRRQV IDVMAAIFQG |
| ef186077-qpm | CCPLTCGKAL ILQNKRTKAS YSINTVVQQL RQEKKNRKCV EHNLTAIFQG |
| ef077279-nat001 | CCPLTCGKAL ILQNKRTKAS YSINTVVQQL RQEKKNRKCV EYNLTAIFQG |
| ny1078 | CCPLICGKAL ILQNKRTKAS YSINTVVQQL RQEKKNRKCV EHNLTAIFQG |
| ef582385-c024 | CCPLLCGKAV VLVNRRTKGS YAINMVVQQL IEESKSRKSV GNNLTAIFQG |
| ef077280-nat045 | CCPLLCGKAV VLVNRKTQVS YSVNMIVEQL RTEYGNRRSV KTNLAAIFQG |
| ef582387-c026 | CCPLTCGKAL ILQNKRTKAS YSINTVVQQL RQEKKNRKCV EHNLTAIFQG |
| ef582386-c025 | CCPLLCGKAI ILQNRRTSAS LSINMVVSQL REESTTRKRV HTNLNAIFQG |
| dq473485-03 | CCPLVCGKAI SLVDRVSNVR FSIDQLVTAI INDYKNKVKI TDSLEVLFQG |
| ef173422-03 | CCPLVCGKAV SLVDRVSNVR FSIDQLVTAI INDYKNKVKI TDSLEVLFQG |
| dq473490-04 | CCPLICGKAL SLVDRHTNVR YSIDQLVTAI ITEHVNKTKI SNSLEVLFQG |
| hrv-05 | CCPLICGKAL SLVDRRTNVR YSIDQLVTAI ITEHANKTKI SSSLEALFQG |
| dq473486-06 | CCPLVCGKAI SLVDRTTNIR YSVDQLVTAI INDYKNKMKI TDSLEVLFQG |
| l05355-14 | CCPLVCGKAI SLVDRTTNVR YSVDQLVTAI ISDFKSKMQI TDSLETLFQG |
| k02121-14 | CCPLVCGKAI SLVDRTTNVR YSVDQLVTAI ISDFKSKMQI TDSLETLFQG |
| ef173420-17 | CCPLICGKAI SLVDRSSNVR YSLDQLVTAI ITDFNNKLKI TDSLEVLFQG |
| hrv-26 | CCPLICGKAL SLVDRRTNVR YSIDQLVTAI ITEHVNKTKI SSSLEVLFQG |
| hrv-27 | CCPLICGKAL SLVDRHTNVR YSIDQLVTAI LQEHNNKTKI TNSLEILFQG |
| ef173421-27 | CCPLICGKAL SLVDRHTNVR YSIDQLVTAI LQEHNNKTKI TNSLEILFQG |
| dq473487-35 | CCPLVCGKAI SLVDRTSNVR YSVDQLVTAI INDYRNKVKI TDSLEVLFQG |
| hrv-35 | CCPLVCGKAI SLVDRTSNVR YSVDQLVTAI INDYRNKVKI TDSLEVLFQG |
| ef173423-37 | CCPLVCGKAI SLVDRATNIR YSVDQLVTAI INDYKNKIKI TDSLEALFQG |
| hrv-42 | CCPLICGKAL SLVDRRTNVR FSIDQLVTAI ITEHANKTKI SSSLEVLFQG |
| dq473488-48 | CCPLICGKAI SLVDRSTNVR YSIDQLVTAI ISDFNNKLKI TDSLEILFQG |
| hrv-52 | CCPLICGKAV SLVDRSTNVR YSLDQLVTAI ITDYNNKLKI TDSLEVLFQG |
| hrv-52-f10 | CCPLICGKAI SLVDRSTNVR YSLDQLVTAI ITDYNNKLKI TDSLEVLFQG |
| ef173424-52 | CCPLICGKAV SLVDRSTNVR YSLXQLVTAI ITDYNNKLKI TDSLEVLFQG |
| hrv-69 | CCPLICGKAI SLVDRSTNVR YSLDQLVTAI ITDFNNKLKI TDSLEILFQG |
| dq473489-70 | CCPLICGKAI SLVDRTSNVR YSLDQLVTAI ITDFNNKLKI TDSLEILFQG |
| hrv-72 | CCPLVCGKAT SLVDRATNVR YSLDQLVTAV VNDYKNKMQI TDSLETLFQG |
| hrv-79 | CCPLVCGKAV SLVDRATNIR YSVDQLVTAI INDYKNKMKI TDSLEALFQG |
| hrv-83 | CCPLVCGKAT SLVDRATNIR YSVDQLVTAI ISDYKNKVKI TDSLEILFQG |
| hrv-84 | CCPLICGKAL SLVDKHTNVR YTIDQLVTAI LQEHNNKTKI TSSLEVLFQG |
| hrv-86 | CCPLVCGKAI SLVDRATNVR YSVDQLITAI INDYNNKIKI TDSLETLFQG |
| hrv-91 | CCPLICGKAI SLVDRTSNVR YSLDQLVTAI ITDFNNKLKI TDSLEVLFQG |
| hrv-92 | CCPLVCGKAI SLVDRATNIR YSVDQLVSAI INDYRNKIKI TDSLEALFQG |
| ef173425-93 | CCPLICGKAL SLVDRHTNVR YSIDQLVTAI LQEHNNKTKI TNSLEVLFQG |
| hrv-97 | CCPLICGKAL SLVDRHTNVR YSIDQLVTAI LQEHNNKTKI TNSLEVLFQG |
| hrv-99 | CCPLICGKAL SLVDRRTNVR YSIDQLVTAI ITEHANKTKI SSSLEVLFQG |
| | 1501 1550 |
| annotation | P......... .........H HHHHHHHHHH HHHHHHHHHH .......... |
| af499637-cva13 | PLEFKDLKID IKTSPPPECI NDLLQSVDSP EVREYCEKKG WIVNVSSETT |
| af546702-cva21 | PLRYKDLKID VKTVPPPECI SDLLQAVDSQ EVRDYCEKKG WIVNVTSQIQ |
| v01149-pv1m | PLQYKDLKID IKTSPPPECI NDLLQAVDSQ EVRDYCEKKG WIVNITSQVQ |
| d00239-01 | P.....ISLD ...APPPPAI ADLLQSVRTP EVIKYCQDNK WIVPAEC..Q |
| pico-01 | P.....ISLD ...VPPPPAI ADLLQSVRTP EVIKYCQDNK WVIPAEC..Q |
| hrv-01 | P.....ISLD ...XPPPPAI XDLLQSVRTP EVIKYCQDNK WVIPAEC..Q |
| x02316-02 | P.....IDM. ..KNPPPPAI TDLLQSVRTP EVIKYCEGNR WIIPAEC..K |
| hrv-07 | ......IDL. ..HTPPPPAI TDLLRSVRTP EVVKYCQDNN WIVPAEC..T |
| dq473503-07 | ......IDL. ..HTPPPPAI TDLLRSVRTP EVVKYCQDNN WIVPAEC..T |
| hrv-08 | P.....INMQ ...SPPPPAI VDLLRSTRNE EVINYCKNQN WIIPADV..S |
| pico-09 | P.....ITM. ..NLPPPPAI ADLLQSVRTP EVVKYCEDNK WTIPAEC..K |
| hrv-09 | P.....ITM. ..NSPPPPAI ADLLQSVRTP EVVKYCEYNK WIIPAEC..K |
| hrv-09-f01 | P.....ITM. ..NSPPPPAI ADLLQSVRTP EVVKYCEDNK WIIPAEC..K |
| hrv-09-f02 | P.....ITM. ..NSPPPPAI ADLLQSVRTP EVVKYCEDNK WIIPAEC..K |
| dq473498-10 | P.....ITLE ...GPPPAAI SDLLQSVRTP EVIKYCEGNK WIIPAEC..K |
| hrv-10 | P.....ITLE ...GPPPAAI SDLLQSVRTP EVIKYCEGNK WIIPAEC..K |
| ef173414-11 | P.....ISLE ...RPPPAAI SDLLQSVRTP EVIKYCEGNK WIIPAEC..K |
| ef173415-12 | P.....ISL. ..KNPPPPAI SDLLNAVRTP EVIKYCEENN WTVPAQC..T |
| hrv-13 | P.....ISME ...VPPPPAI TDLLRSVKTP EVIKYCEDNK WIIPAEC..K |
| hrv-13-f03 | P.....ISME ...APPPPAI ADLLRSVKTP EVIKYCEDNK WIIPADC..R |
| dq473493-15 | P.....ISM. ..NNPPPPAI VDLLQSVRTP EVVKYCEDNK WMLPADC..K |
| l24917-16 | P.....ISMD ...KPPPPAI TDLLRSVRTP EVIKYCQDNK WIVPADC..Q |
| hrv-18 | P.....ITLE ...GPPPAAI SDLLQSVRTP EVIKYCEENK WIIPAEC..K |
| hrv-19 | P.....ISM. ..NAPPPPAI TDLLQSVRTP EVIKYCEDNK WXIPADC..K |
| hrv-20 | P.....IDIV ..NKPPPPAI IDLLESVRSP DVIKYCEENK WIIPSDC..K |
| hrv-21 | P.....ISLE ...GPPPAAI SDLLQSVRTP EVIKYCEANK WIIPAEC..K |
| hrv-22 | P.....ISMD ...XPPPPAI XDLLQSVRTP EVIKYCEXNK WIIPAEC..K |
| dq473497-23 | P.....IDM. ..KNPPPPAI TDLLQSVRTP EVIKYCEENR WIIPAEC..K |
| hrv-24 | P.....ITLE ...GPPPAAI NDLLKSVRTP EVIKYCEYNK WTVPAEC..K |
| ef173416-24 | P.....ITLE ...GPPPAAI NDLLKSVRTP EVIKYCEDNK WTVPAEC..K |
| hrv-25 | P.....ITIE ...GPPPAAI NDLLKSVRTP EVIRYCEENK WIVPAEC..K |
| dq473508-28 | P.....IDVV ..NKPPPPAI IDLLKSVRNP DVIRYCEENK WIIPSDC..K |
| hrv-29 | P.....ITLE ...GPPPAAI NDLLKSVRTP EVIKYCEENK WIIPTEC..K |
| dq473512-30 | P.....IDM. ..RNPPPPAI TDLLQAVRTP EVIKYCEENK WVIPAEC..K |
| hrv-30 | P.....IDM. ..RNPPPPAI TDLLQAVRTP EVIKYCEENK WIIPAEC..K |
| hrv-31 | P.....ITLE ...GPPPAAI NDLLKSVRTP EVIKYCEDNK WIVPTEC..K |
| hrv-32 | P.....ISM. ..NSPPPPAI ADLLQSVRTP EVVKYCEYNK WIIPAEC..K |
| hrv-33 | P.....ISLE ...XPPPAAI SDLLQSVRTP EVIKYCEDNK WIIPAGC..R |
| hrv-34 | P.....ISME ...GPPPAAI SDLLQSVRTP EVIKYCEXNK WMIPAEC..K |
| dq473501-34 | P.....ISME ...GPPPAAI SDLLQSVRTP EVIKYCEVNK WMIPAEC..K |
| dq473505-36 | ......IDLQ ...SPPPPAI ADLLRSVKTP EIIKYCQGNN WIVPAEC..S |
| hrv-38 | P.....ISM. ..NAPPPPAI EDLLQSVRTP EVIKYCEENK WIIPADC..K |
| dq473495-38 | P.....ISM. ..NAPPPPAI EDLLQSVRTP EVIKYCEENK WIIPADC..K |
| ay751783-39 | P.....ISLQ ...NPPPPAI ADLLQSVRTP EVIKYCEENK WIIPAEC..K |
| hrv-40 | P.....ISLE ...GPPPAAI SDLLQSVRTP EVIKYCEDNK WIIPAGC..K |
| dq473491-41 | P.....ISME V...PPPPAI TDLLRSVKTP EVIKYCENNK WIIPAEC..K |
| hrv-43 | P.....ITLD ...APPPPAI TDLLRSVRTP EVIKYCEDNK WMIPAGC..K |
| dq473499-44 | P.....ITLE ...GPPPAAI NDLLKSVRTP EVIKYCEGNK WIIPAEC..K |
| hrv-45 | P.....IDMQ ...APPPPAI VDLLRSTRNE DVINYCKNQN WIIPADI..S |
| dq473506-46 | P.....IDVV ..NKPPPPAI VDLLKSVRNP DVIRYCEENK WIIPADC..R |
| hrv-47 | P.....ITLE ...GPPPAAI NDLLKSVRTP EVIKYCEDNK WVVPAEC..K |
| dq473496-49 | P.....IDM. ..KNPPPPAI TDLLQSVRTP EVIKYCEVNR WIIPAEC..K |
| hrv-49-f04 | P.....IDM. ..KNPPPPAI TDLLQSVRTP EVIKYCEDNR WIIPAEC..K |
| hrv-50 | P.....ISLE ...GPPPAAI SDLLHSVRTP EVIKYCEDNK WIVPAEC..K |
| hrv-51 | P.....IDVI ..NKPPPPAI LDLLKSVRNP DVIKYCEENK WMIPADC..K |
| dq473507-53 | P.....IDIV ..NKPPPPAI VDLLKSVRNP DVIRYCEENK WIIPADC..K |
| hrv-54 | P.....ISLE ...GPPPAAI SDLLQSVRTP EVIKYCEYNK WIIPAEC..K |
| hrv-54-f05 | P.....ISLE ...GPPPAAI SDLLQSVRTP EVIKYCEDNK WIIPAEC..K |
| dq473511-55 | P.....ISL. ..KGPPPAAI SDLLQSVRTP EVIKYCEENK WIIPTEC..K |
| hrv-56 | P.....ITLE ...GPPPAAI SDLLQSVRTP EVIKYCENNK WIIPAEC..K |
| hrv-57 | P.....ISLE ...GPPPAAI SDLLQSVRTP EVIKYCEQNK WIIPAEC..K |
| hrv-58 | ......IDLQ ...SPPPPAI TDLLRSVRTP EIIKYCQGNN WIVPAEC..S |
| dq473500-59 | P.....ITLE ...GPPPAAI NDLLQSVRTP EVIKYCEYNK WIIPAEC..K |
| hrv-60 | P.....ISM. ..NAPPPPAI ADLLQSVRTP EVIKYCEENK WVIPADC..K |
| hrv-61 | P.....ISME ...VPPPPAI TDLLRSVKTP EVIKYCEDNK WTIPADC..K |
| hrv-62 | P.....ITIE ...GPPPAAI NDLLKSVRTP EVIRYCEENK WMVPAEC..K |
| hrv-63 | P.....ITLE ...GPPPAAI SDLLQSVRTP EVIKYCEKNK WIIPAEC..K |
| hrv-64 | P.....ISMS ...APPPPAI ADLLQSVRTP EVIKYCEENK WIIPADC..K |
| ef173417-64 | P.....ISMS ...APPPPAI ADLLQSVRTP EVIKYCEENK WIIPADC..K |
| hrv-65 | P.....IDVV ..NKPPPPAI LDLLKSVRNP DVIKYCEDNK WIVPADC..K |
| hrv-66 | P.....ITLE ...GPPPAAI SDLLQSVRTP EVIKYCEGNK WIIPAEC..K |
| hrv-67 | P.....ISM. ..NLPPPPAI TDLLQSVRTP EVVKYCEDNN WIIPAEC..K |
| hrv-68 | P.....IDVV ..NKPPPPAI IDLLRSVRNP DVIKYCEENK WMIPSDC..K |
| hrv-71 | P.....IDVV ..NKPPPPAI LDLLKSVRNP EVIRYCEDNR WIVPVDC..R |
| dq473492-73 | P.....ISME ...VPPPPAI TDLLRSVRTP EVIKYCENNK WIVPADC..K |
| dq473494-74 | P.....ISM. ..NNPPPPAI ADLLQSVRTP EVIKYCEDNK WIIPAEC..K |
| dq473510-75 | P.....ITLD ...APPPPAI TDLLRSVRTP EVIKYCEENK WIIPTDC..R |
| dq473502-76 | P.....ISLE ...GPPPAAI SDLLQSVRTP EVIKYCEYNK WIVPAEC..R |
| hrv-76 | P.....ISLE ...GPPPAAI SDLLQSVRTP EVIKYCEYNK WIVPAEC..R |
| hrv-77 | P.....ITLE ...GPPPAAI NDLLXSVRTP EVIKYCEDNK WIIPXEC..K |
| hrv-78 | P.....ITL. ..NGPPPPAI LDLLKSVRTP EVIKYCEDNK WIVPAEN..T |
| ef173418-78 | P.....ITL. ..NGPPPPAI LDLLKSVRTP EVIKYCEDNK WIVPAEN..T |
| hrv-80 | P.....IDM. ..NRPPPPAI VDLLKSVRNP DVIKYCEDNK WVVPTEC..K |
| hrv-81 | P.....ISMD ...KPPPPAI TDLLRSVRTP EVIKYCQDNK WIVPADC..Q |
| hrv-81-f06 | P.....ISMD ...KPPPPAI TDLLRSVRTP EVIKYCQDNK WIVPADC..Q |
| hrv-81-f07 | P.....ISMD ...KPPPPAI TDLLRSVRTP EVIKYCQDNK WIVPADC..Q |
| hrv-82 | P.....ITMD ...APPPPAI ADLLQSVRTP EVIKYCEENK WIIPADC..K |
| dq473509-82 | P.....ITM. ..NAPPPPAI ADLLQSVRTP EVIKYCEENK WIIPADC..K |
| hrv-85 | P.....ISLV ...GPPPAAI SDLLQSVRTP EVIRYCEVNK WIIPAEC..K |
| pico-85 | P.....ISLV ...GPPPAAI SDLLQSVRTP EVIRYCEVNK WIIPAEC..K |
| dq473504-88 | ......IDLQ ...SPPPPAI TDLLRSVRTP EIIKYCQDNN WIVPAEC..S |
| a10937-89 | ......IDLQ ...SPPPPAI ADLLRSVKTP EIIKYCQDNN WIVPAEC..S |
| hrv-89 | ......IDLQ ...SPPPPAI ADLLRSVKTP EIIKYCQDNN WIVPAEC..S |
| hrv-89-f08 | ......IDLQ ...SPPPPAI ADLLRSVKTP EIIKYCQDNN WIVPAEC..S |
| hrv-89-f09 | ......IDLQ ...SPPPPAI ADLLRSVKTP EIIKYCQDNN WIVPAEC..S |
| m16248-89 | ......IDLQ ...SPPPPAI ADLLRSVKTP EIIKYCQDNN WIVPAEC..S |
| hrv-90 | P.....ITLE ...GPPPAAI NDLLKSVRTP EVIKYCEGNK WIVPAEC..K |
| hrv-94 | P.....ISM. ..NAPPPPAI ADLLQSVRTP EVIKYCEENK WVIPADC..K |
| ef173419-94 | P.....ISM. ..NAPPPPAI ADLLQSVRTP EVIKYCEENK WVIPADC..K |
| hrv-95 | P.....INMQ ...SPPPPAI VDLLRSTRNE EVINYCKNQN WIIPADV..S |
| hrv-96 | P.....ISME ...VPPPPAI TDLLRSVKTP EVIKYCENNK WIIPADC..K |
| hrv-98 | P.....ISLE ...GPPPAAI SDLLQSVRTP EVIKYCEYNK WIIPAEC..K |
| hrv-100 | P.....ISLD ...GPPPAAI SDLLQSVRTP EVIKYCENNR WIIPAEC..K |
| ef186077-qpm | .......LGD DST...PGFI IDLLSASKDP KVIEFCEKEG WIKQSRC.SK |
| ef077279-nat001 | .......LGD DST...PGFI VDLLSASKDP KVIEFCEKEG WIKQSKH.SK |
| ny1078 | .......LGD DTT...PGFI IDLLSASKDP KVIEFCEKEG WIKQSKC.SK |
| ef582385-c024 | .......LGD KET...PGFI IDLLSSSKDP KVIQYCQDQG YISPVHG..S |
| ef077280-nat045 | .......LGD QET...PGFI IDLLRSSKDP KVIQYCEEEG LILRSST..T |
| ef582387-c026 | .......LGD DST...PGFI VDLLSASKDP KVIEFCEKEG WIKQSKY.SK |
| ef582386-c025 | .......LGS DET...PGFI VDLLSSSRDP RVIEYCEKEG LIVKATH..T |
| dq473485-03 | PV.YKDLEID ICNTPPPECI SDLLKSVDSE EVREYCKKKK WIIPQIS.TN |
| ef173422-03 | PV.YKDLEID ICNTPPPECI SDLLKSVDSE EVREYCKKKK WIIPQIS.TN |
| dq473490-04 | PT.YKDLNIN VTTTPPPECI VDLLKSVDNE EVRQYCQGKK WLIPEIP.TN |
| hrv-05 | PV.YKDLSID ITTTPPPECI VDLLKSVDNE EVRQYCQEKR WLIPEIP.TN |
| dq473486-06 | PV.YKDLEID VCNTPPPECI NDLLKSVDSE EVREYCKKKK WIIPQIP.TN |
| l05355-14 | PV.YKDLEID VCNTPPPECI NDLLKSVDSE EIREYCKKKK WIIPEIP.TN |
| k02121-14 | PV.YKDLEID VCNTPPSECI NDLLKSVDSE EIREYCKKKK WIIPEIP.TN |
| ef173420-17 | PV.YKDLEID VHNTPPPECI SDLLKSVDSE ELREYCKQKN WLIPEIP.TN |
| hrv-26 | PV.YKDLNID VTTTPPPECI VDLLKSVDNE EVRQYCQEKR WLIPELP.TN |
| hrv-27 | PV.YKDMTID VYDKPPPDCI VDLLKSVDSV EVRQYCREKK WLIPEIP.TN |
| ef173421-27 | PV.YKDMTID VYDKPPPDCI VDLLKSVDSV EVRQYCREKK WLIPEIP.TN |
| dq473487-35 | PV.YKDLEID VCNTPPPECI NDLLKSVDSE EVRDYCKKKN WIIPQIP.TN |
| hrv-35 | PV.YKDLEID VCNTPPPECI NDLLKSVDSE EVRDYCKKKN WIIPQIP.TN |
| ef173423-37 | PV.YRDLEID VCNKSPPECI NDLLKSVDSE ELREYCKKKN WIIPQVP.TN |
| hrv-42 | PT.YKDLHID VTTTPPPECI VDLLKSVDNE EVRQYCQEKR WLIPEIP.TN |
| dq473488-48 | PT.YKDLEIE IHNTPPPECI SDLLKSVDSE ELREYCKQKN WLIPEIP.TN |
| hrv-52 | PV.YKDLEID VHSTPPPECI NDLLKSVDSK ELREYCKQKN WLIPEIP.TN |
| hrv-52-f10 | PV.YKDLEID VHSTPPPECI NDLLKSVDSE ELREYCKQKN WLIPEIP.TN |
| ef173424-52 | PV.YKDLEID VHSTPPPECI NDLLKSVDSK ELREYCKQKN WLIPEIP.TN |
| hrv-69 | PV.YKDLEID VHTTPPPECI NDLLKSVDSE ELREYCKQKN WLIPEIP.TN |
| dq473489-70 | PV.YKDLEID VHNTPPPECI SDLLKSVDSE ELREYCKQKN WLIPEIP.TN |
| hrv-72 | PV.YKDLEID VNSTPPPECI NDLLRSVDSE EIREYCKKKN WTIPEIP.TN |
| hrv-79 | PV.YKDLEID ICNTPPPECI NDLLKSVDSE EIREYCKKKN WTIPQIP.TN |
| hrv-83 | PV.YKDLEID VCNTPPPECI SDLLRSVDSE EVREYCKKKN WIIPQIP.TN |
| hrv-84 | PV.YKDLNID VHDKPPPECI VDLLKSVDCD EVRQYCKEKK WLIPEIP.TN |
| hrv-86 | PV.YKDIEID VCNTPPPECI NDLLKSVDSE EVREYCKKKK WTIPEIP.TD |
| hrv-91 | PV.YKDLEID IHSTPPPECI SDLLKSVDSE ELREYCKQKN WLIPEIP.TN |
| hrv-92 | PV.YKDLEID VCNTPAPECI NDLLKSVDSE EVREYCKKKN WIIPQIP.TN |
| ef173425-93 | PV.YKDLTID VNDKPPPDCI VDLLKSVDSE EVRQYCREKK WLIPEVP.TN |
| hrv-97 | PV.YKDITID VHDKPPPDCI VDLLKSVDSE EVRQYCREKK WLIPEIP.TN |
| hrv-99 | PV.YKDLSID ITTTPPPECI VDLLKSVDNE EVRQYCQEKK WLIPEIP.TN |
| | 1551 1600 |
| annotation | .......... .......... .......... .....QGP.. .......... |
| af499637-cva13 | IERNLSRAMT ILQALTTFAA VAGVVYVMYR LFAGQQGAYT GLP.NKRPNV |
| af546702-cva21 | LERNINRAMT ILQAVTTFAA VAGVVYVMYK LFAGQQGAYT GLP.NKKPNV |
| v01149-pv1m | TERNINRAMT ILQAVTTFAA VAGVVYVMYK LFAGHQGAYT GLP.NKKPNV |
| d00239-01 | IERDLSIANS IITIIANIIS IAGIIFVIYK LFCTLQGPYS GEP.KPKTKM |
| pico-01 | VERDLNIANS IIAIIANIIS IAGIIFVIYK LFCSLQGPYS GEP.KPKTKV |
| hrv-01 | VERDLNIANS IIAIIANIIS IAGIIFVIYK LFCSLQGPYS GEP.KPKTKV |
| x02316-02 | IEKELNLANT IITIIANVIG MARIIYVIYK LFCTLQGPYS GEP.KPKTKI |
| hrv-07 | IERDLGLANL TISIIANVVS IVGIIYIIYK LFCTLQGPYS GEP.KPKTRA |
| dq473503-07 | IERDLGLANL TISIIANVVS IVGIIYIIYK LFCTLQGPYS GEP.KPKTRA |
| hrv-08 | VERELNLVNL SISILANIIS IVGIIYIIYK LFISLQGPYS GLP.SKKKTI |
| pico-09 | IERDLNLANN IITIIANIIS IVGIIFVIYK LFCSLQGPYS GEP.KPKTRV |
| hrv-09 | IERDLNLANN IITIIANIIS IAGIIFVIYK LFCSLQGPYS GEP.KPKTRI |
| hrv-09-f01 | IERDLNLANN IITIIANIIS IAGIIFVIYK LFCSLQGPYS GEP.KPKTRV |
| hrv-09-f02 | IERDLNLANN IITIIANIIS IAGIIFVIYK LFCSLQGPYS GEP.KPKTRV |
| dq473498-10 | VERDLNIANT IITIIANIIS ISGIIYVIYK LFCTLQGPYS GEP.KPKTKI |
| hrv-10 | VERDLNIANT IITIIANIIS ISGIIYVIYK LFCTLQGPYS GEP.KPKTKI |
| ef173414-11 | IERDLNIANT IITIIANVIS ISGIIYVIYK LFCTLQGPYS GEP.KQKTKI |
| ef173415-12 | IERELNYCNL VLSMIANLVS IIGIVYVIYK LFCSFQGPYS GQP.EPNTRQ |
| hrv-13 | IERDLNLANN IIAIIANIIS IAGIIYIIYK LFCSFQGPYS GEP.KPKTKI |
| hrv-13-f03 | IERDLNLANN IITIIANIIS IAGIIYIIYK LFCSFQGPYS GEP.KPKTKI |
| dq473493-15 | IERDLNLANS IITIIANIIS IAGIIFVIYK LFCSLQGPYS GEP.KPKTKI |
| l24917-16 | IERDLNIANS IITIIANIIS IAGIIYIIYK LFCSLQGPYS GEP.KPKTKV |
| hrv-18 | VERDLNIANT IITIIANIVS ISGIIYVIYK LFCTLQGPYS GEP.KPKTKI |
| hrv-19 | IERDLNIANN IITIIANIIS IAGIIFVIYK LFCSLQGPYS GEP.KPKTKV |
| hrv-20 | LERDLNYANL IISMLANVIS IMGVIYIIYK LFCSLQGPYS GEP.KPTTRK |
| hrv-21 | VERDLNIANT IITIIANIIS ISGIIYVIYK LFCTLQGPYS GEP.KPKTKM |
| hrv-22 | IERDLNLANN IITIIANVIS IAGIIFVIYK LFCTLQGPYS GEP.KPKTKI |
| dq473497-23 | IEKELNLANT IITIIANVIS IAGIIYVIYK LFCTLQGPYS GEP.KIKTKI |
| hrv-24 | IERDLNVANT IITIMANIIS IAGIIYVIYK LFCTLQGPYS GEP.IKKTKV |
| ef173416-24 | IERDLNVANT IITIMANIIS IAGIIYVIYK LFCTLQGPYS GEP.IKKTKV |
| hrv-25 | IERDLNIANT IITIIANIIS ISGIIYVIYK LFCTLQGPYS GEP.KPKTKI |
| dq473508-28 | LERDLNYANL IISMLANVIS IMGVIYIIYK LFCSLQGPYS GEP.KPITKK |
| hrv-29 | VERDLNLANT IISIIANIIS ISGIIYVIYK LFCTLQGPYS GEP.KPKTKV |
| dq473512-30 | IEKGLNLANT IITIIANVIS IAGIIYVIYK LFCTLQGPYS GEP.KPKTKI |
| hrv-30 | IEKGLNLANT IITIIANVIS IAGIIYVIYK LFCTLQGPYS GEP.KPKTKI |
| hrv-31 | IERDLNIANT IITIIANIIS ISGIIYVIYK LFCTLQGPYS GEP.KPKTKI |
| hrv-32 | IERDLNLANN IITIIANIIS IAGIIFVIYK LFCSLQGPYS GEP.KPKTKI |
| hrv-33 | IERDLNIANT IITIIANVIS ISGIIYVIYK LFCTLQGPYS GEP.KQRTKI |
| hrv-34 | VERDLNIANT IITIIANIIS ISGIIYVIYK LFCTLQGPYS GEP.KPKTKV |
| dq473501-34 | VERDLNIANT IITIIANIIS ISGIIYVIYK LFCTLQGPYS GEP.KPKTKV |
| dq473505-36 | IERDLGIANM TIGIIANVVS IVGVIYIIYK LFCTLQGPYS GEP.KPKSKA |
| hrv-38 | IERDLNLANN IITIIANIIS IAGIIFVIYK LFCSLQGPYS GEP.KPKTRT |
| dq473495-38 | IERDLNLANN IITIIANIIS IAGIIFVIYK LFCSLQGPYS GEP.KPKTRT |
| ay751783-39 | IEKELNLANT IITIIANVIN IAGIIYVIYK LFCTLQGPYS GEP.KPKTKI |
| hrv-40 | VERDLNIANT IITIIANIIS ISGIIYVIYK LFCTLQGPYS GEP.KPKTKI |
| dq473491-41 | IERDLNLANN IITIIANIIS IAGIIYIIYK LFCSFQGPYS GEP.KPKTRV |
| hrv-43 | IERDLNLANN IITIIANIIS IAGIIFVIYK LFCSLQGPYS GEP.KPKTKV |
| dq473499-44 | IERDLNLANT IITIIANIIS ISGIIYVIYK LFCTLQGPYS GEP.KPKTKI |
| hrv-45 | IERELNLVNL SISILANLIS VIGIIYIIYK LFVSLQGPYS GLP.TKKKVI |
| dq473506-46 | LERDLNYANL IISMIANVIS IMGVIYIIYK LFCSLQGPYS GEP.KPVTKK |
| hrv-47 | VERDLNIANT VITIIANIIS ISGIIYVIYK LFCTLQGPYS GEP.KPKTKI |
| dq473496-49 | IEKELNLANT IITIIANVIS IAGIIYVIYK LFCTLQGPYS GEP.KPKTKV |
| hrv-49-f04 | IEKELNLANT IITIIANVIS IAGIIYVIYK LFCTLQGPYS GEP.KPKTKV |
| hrv-50 | IERDLNIANT IITIIANIIS ISGIIYVIYK LFCTLQGPYS GEP.KPKTRM |
| hrv-51 | LERDLNYANL VISMIANVIS ILGVIYIIYK LFCSLQGPYS GEP.KPISRK |
| dq473507-53 | LERDLNYANV IISMIANVIS IMGVIYIIYK LFCSLQGPYS GEP.KPVTKK |
| hrv-54 | IERDLNLANT IITIIANIIS ISGIIYVIYK LFCTLQGPYS GEP.KPKTKV |
| hrv-54-f05 | IERDLNLANT IITIIANIIS ISGIIYVIYK LFCTLQGPYS GEP.KPKTKV |
| dq473511-55 | VERDLNIANT IITIIANIIS ISGIIYVIYK LFCTLQGPYS GEP.KPKTRM |
| hrv-56 | IERDLNIANT IITIIANIIS ISGIIYVIYK LFCTLQGPYS GEP.KPKTKI |
| hrv-57 | IERDLNVANT IITIIANIIS ISGIIYVIYK LFCTLQGPYS GEP.KPKTRM |
| hrv-58 | IERDLGIANM AISIIANVVS IVGVIYIIYK LFCTLQGPYS GEP.KPKSRA |
| dq473500-59 | VERDLNIANT IITIIANIIS ISGIIYVIYK LFCTLQGPYS GEP.KPKTKI |
| hrv-60 | IERDLNLANN ITTIIANIIS IAGIIFVIYK LFCSLQGPYS GEP.KPKTKV |
| hrv-61 | IERDLILANN IITIIANIIS IAGIIYIIYK LFCSFQGPYS GEP.KPKTKI |
| hrv-62 | VERDLNIANT IITIIANIIS ISGIIYVIYK LFCTLQGPYS GEP.RPKTKI |
| hrv-63 | VERDLNIANT IITIIANIIS ISGIIYVIYK LFCTLQGPYS GEP.KPKTKI |
| hrv-64 | IERDLNLANN ITTIIANVIS IAGIIFVIYK LFCTLQGPYS GEP.KPKTKV |
| ef173417-64 | IERDLNLANN ITTIIANVIS IAGIIFVIYK LFCTLQGPYS GEP.KPKTKV |
| hrv-65 | LERDLNYANL VISMIANVVS ILGVIYIIYK LFCSLQGPYS GEP.KPATRK |
| hrv-66 | VERDLNIANT IITIIANIIS ISGIIYVIYK LFCTLQGPYS GEP.KPKTRI |
| hrv-67 | IERDLNLANN IIAIIANIIS IAGIIFVIYK LFCSLQGPYS GEP.KPKTKI |
| hrv-68 | LERDLNYANL IISMLANVIS IMGVIYIIYK LFCSLQGPYS GEP.KPVTKK |
| hrv-71 | LERDLNYANL VISMIANVIS ILGVIYIIYK LFCSLQGPYS GEP.KPITRK |
| dq473492-73 | IERDLNLANN IITIIANIIS IAGIIYIIYK LFCSFQGPYS GEP.KPKTKV |
| dq473494-74 | IERDLNLANN IITIIANIIS IAGIILVIYK LFCSLQGPYS GEP.KPKPKI |
| dq473510-75 | IERDLNLANN IITIIANVVS IAGIICVIYK IFCSLQGPYS GEP.KPKTKI |
| dq473502-76 | IERDLNIANT IITIIANVIS ISGIIYVIYK LFCTLQGPYS GEP.KQKTKI |
| hrv-76 | IERDLNIANT IITIIANVIS ISGIIYVIYK LFCTLQGPYS GEP.KQKTKI |
| hrv-77 | VERDLNMANT IITIIANIIS ISGIIYVIYK LFCTLQGPYS GEP.KPKTKV |
| hrv-78 | IERDLNVANS VITIIANLIS IVGVIYIIYK LFCSLQGPYS GEP.KPKTKT |
| ef173418-78 | IERDLNVANS VITIIANLIS IVGVIYIIYK LFCSLQGPYS GEP.KPKTKT |
| hrv-80 | LERDLNYANL VISMLANVIS IVGVIYIIYK LFCSLQGPYS GEP.KPVTKK |
| hrv-81 | IERDLNIANN IITIIANIIS IAGIIYIIYK LFCTLQGPYS GEP.KPKTKI |
| hrv-81-f06 | IERDLSIANS IITIIANIVS IAGIIYIIYK LFCTLQGPYS GEP.KPKTKV |
| hrv-81-f07 | IERDLSIANS IITIIANIIS IAGIIYIIYK LFCTLQGPYS GEP.KPKTKV |
| hrv-82 | IERDLNLANN IITIIANVIS IAGIIFVIYK LFYTLQGPYS GEP.KPKPKI |
| dq473509-82 | IERDLNLANN IITIIANVIS IAGIIFVIYK LFCTLQGPYS GEP.KPKPKI |
| hrv-85 | VERDLNIANT IITIIANIIS ISGIIYVIYK LFCTLQGPYS GEP.KPKTKI |
| pico-85 | VERDLNIANT IITIIANIIS ISGIIYVIYK LFCTLQGPYS GEP.KPKTKI |
| dq473504-88 | IERDLGLANL TIGIIANVVS IVGIIYIIYK LFCTLQGPYS GEP.KPKTRA |
| a10937-89 | IERDLGIANM TIGIIANVVS IVGVIYIIYK LFCTLQGPYS GEP.KPKSRA |
| hrv-89 | IERDLGIANM TIGIIANVVS IVGVIYIIYK LFCTLQGPYS GEP.KPKSRA |
| hrv-89-f08 | IERDLGIANM TIGIIANVVS IVGVIYIIYK LFCTLQGPYS GEP.KPKSRA |
| hrv-89-f09 | IERDLGIANM TIGIIANVVS IVGVIYIIYK LFCTLQGPYS GEP.KPKSRA |
| m16248-89 | IERDLGIANM TIGIIANVVS IVGVIYIIYK LFCTLQGPYS GEP.KPKSRA |
| hrv-90 | IERDLNVANT IITIIANIIS ISGIIYVIYK LFCTLQGPYS GEP.VKKTKI |
| hrv-94 | IERDLNLANN IITIIANVIS IAGIIFVIYK LFCTLQGPYS GEP.KPKTKT |
| ef173419-94 | IERDLNLANN IITIIANVIS IAGIIFVIYK LFCTLQGPYS GEP.KPKTKT |
| hrv-95 | VERELNLVNL SISILANIIS IVGIIYIIYK LFISLQGPYS GLP.SKKKTI |
| hrv-96 | IERDLNLANN IITIIANIIS IAGIIYIIYK LFCSFQGPYS GEP.KPKTKI |
| hrv-98 | IERDLNIANT IITIIANIIS ISGIIYVIYK LFCTLQGPYS GEP.KPKTKI |
| hrv-100 | VERDLNIANT IITIIANIIS ISGIIYVIYK LFCTLQGPYS GEP.KPKTKV |
| ef186077-qpm | IERDFNYAQY CINCVGSIIL ILGTVYALYK LMCIAQGPYT GLP.QPKVRK |
| ef077279-nat001 | IERDFNYVQY CLNCVGSIIL ILGTVYALYK LMCIAQGPYT GLP.QPKPRK |
| ny1078 | IERDFNYAQY CINCVGSIVL ILGTVYALYK LMCIAQGPYT GLP.QPKPRK |
| ef582385-c024 | IERDFAYVTY ALNCLGSLVI ILGTIYALYR LMCIAQGPYT GMP.TTPKKK |
| ef077280-nat045 | LDRHIDRVQQ AINCIGSLVV ILGTIYALYK LMSMTQGAYT GHV.EPTLKR |
| ef582387-c026 | IERDFNYAQY CINCVGSIVL ILGTVYALYK LMCIAQGPYT GLP.QPKPRK |
| ef582386-c025 | LEKNLEYTQY CLNCLGSLIL IIGTIYAIYK LLCVSQGAYS GNA.NPIPRK |
| dq473485-03 | IERAVNQASM IINTILMFVS TLGIVYVIYK LFAQTQGPYS GNPVHNKLKP |
| ef173422-03 | IERAVNQASM IINTILMFVS TLGIVYVIYK LFAQTQGPYS GNPVHNKLKP |
| dq473490-04 | VERAVNQATN LINTILMFIT TLGIIYMIYK LFAQTQGPYS GLDGKSKLKP |
| hrv-05 | IDRAVNQATS LINTILMFIT TLGIVYMIYK LFAQTQGPYS GLDNKSKLKP |
| dq473486-06 | IERAMNQASM IINTILMFVS TLGIVYVIYK LFAQTQGPYS GNPSHNKLKP |
| l05355-14 | IERAMNQASM IINTILMFVS TLGIVYVIYK LFAQTQGPYS GNPPHNKLKA |
| k02121-14 | IERAMNQASM IINTILMFVS TLGIVYVIYK LFAQTQGPYS GNPPHNKLKA |
| ef173420-17 | IERAVNQAST IINTILMFVS TLGILYVIYK LFAQTQGPYS GNPSHTKLKP |
| hrv-26 | IDRAVNQATS LINTILMFIT TLGIVYMIYK LFAQTQGPYS GLDSKSKLKP |
| hrv-27 | IDRAVNQATS LINTILMFIT TMGIVYMIYK MFAQTQGPYS GLDSKAKLKA |
| ef173421-27 | IDRAVNQATS LINTILMFIT TMGIVYMIYK MFAQTQGPYS GLDSKAKLKA |
| dq473487-35 | IERAVNQASM IINTILMFVS TLGIVYVIYK LFAQTQGPYS GNPTHNKLKP |
| hrv-35 | IERAVNQASM IINTILMFVS TLGIVYVIYK LFAQTQGPYS GNPTHNKLKP |
| ef173423-37 | IERAMNQASM IINTILMFVS TLGIVYVIYK LFAQTQGPYS GNPSHNKLKP |
| hrv-42 | VERAVNQATN LINTILMFIT TLGIIYMIYK LFAQTQGPYS GLDNKSKLKP |
| dq473488-48 | IERAVNQAST IINTILMFVS TLGILYVIYK LFAQTQGPYS GNPSHTKLKP |
| hrv-52 | IERAVNQAST IINTILMFVS TLGILYVIYK LFAQTQGPYS GNPSHTKLKP |
| hrv-52-f10 | IERAVNQAST IINTILMFVS TLGILYVIYK LFAQTQGPYS GNPSHTKLKP |
| ef173424-52 | IERAVNQAST IINTILMFVS TLGILYVIYK LFAQTQGPYS GNPSHTKLKP |
| hrv-69 | VERAVNQAST IINTILMFVS TLGILYVIYK LFAQTQGPYS GNPSHTKLKP |
| dq473489-70 | IERAVNQAST IINTILMFVS TLGILYVIYK LFAQTQGPYS GNPSHVKLKP |
| hrv-72 | IERAVNQASM IINTILMFVS TLGIIYVIYK LFAQTQGPYS GNPAHSKLKA |
| hrv-79 | IDRAMNQASM IINTILMFVS TLGIVYVIYK LFAQTQGPYS GNPSHNKLKP |
| hrv-83 | IERAVNQASM IINTILMFVS TLGIVYVIYK LFAQTQGPYS GNPSHGKLKA |
| hrv-84 | VERAVNQATS LINTILMFIT TMGIIYMIYK MFAQMQGPYS GLESKTKLKA |
| hrv-86 | IERAVNQASM IINTILMFVS TLGIVYVIYK LFAQTQGPYS GNVAHNKLKP |
| hrv-91 | IERAVNQAST IINTILMFVS TLGILYVIYK LFAQTQGPYS GNPSHTKLKP |
| hrv-92 | IERAVNQASM IINTILMFVS TLGIVYVIYK LFAQTQGPYS GNPAHNKLKA |
| ef173425-93 | IDRAVNQATS LINTILMFIT TMGIVYMIYK MFAQTQGPYS GLDNKTKLKA |
| hrv-97 | IDRAVNQATS LINTILMFIT TMGIVYMIYK MFAQTQGPYS GLDTKTKLKA |
| hrv-99 | VERAVNQATN LINTILMFIT TLGIVYMIYK LFAQTQGPYS GLDSKSKLKP |
| | 1601 1650 |
| annotation | ........QG PHHHHHHHHH HHHBBBBB.. ..BBBBBBBB ..BBBB..H. |
| af499637-cva13 | PTIRTAKVQG PGFDYAVAMA KRNITTATTS KGEFTMLGVY DNVAILPTHA |
| af546702-cva21 | PTIRVAKVQG PGFDYAVAMA KRNIVTATTT KGEFTMLGVH DNVAILPTHA |
| v01149-pv1m | PTIRTAKVQG PGFDYAVAMA KRNIVTATTS KGEFTMLGVH DNVAILPTHA |
| d00239-01 | PE.RRVVAQG PEEEFGRSIL KNNTCVITTD NGKFTGLGIY DRTLIIPTHA |
| pico-01 | PE.RRIVAQG PEEEFGRSIL KNNTCVITTG NGKFTGLGIH DRILSHPTHA |
| hrv-01 | PE.RRVVAQG PEEEFGRSIL KNNTCVITTG NGKFTGLGIH DRILIIPTHA |
| x02316-02 | PE.RRVVTQG PEEEFGMSLI KHNSCVITTE NGKFTGLGVY DRFVVVPTHA |
| hrv-07 | PE.RRVVTQG PEEEFGRSLI KHNCCVVTTD KGKFTGLGIY NQIMVLPTHS |
| dq473503-07 | PE.RRVVTQG PEEEFGRSLI KHNCCVVTTD KGKFTGLGIY NQIMVLPTHS |
| hrv-08 | PE.KRIVVQG PTTEFGLSLI KHNTCVVETD NGKFTGLGIF DNVLVIPTHA |
| pico-09 | PE.RRVVAQG PEEEFGRSLI KHNTCVVTTD NGKFTGLGIY DRYMIVPTHA |
| hrv-09 | PE.RRVVAQG PEEEFGRSLI KHNTCVVTTD NGKFTGLGIY DRYMIVPTHA |
| hrv-09-f01 | PE.RRVVAQG PEEEFGRSLI KHNTCVVTTD NGKFTGLGIY DRYMIIPTHA |
| hrv-09-f02 | PE.RRVVAQG PEEEFGRSLI KHNTCVVTTD NGKFTGLGIY DRYMIIPTHA |
| dq473498-10 | PE.RRVVAQG PEEEFGRSLI KHNSCIVTTQ NGKFTGLGIY DRMLILPTHA |
| hrv-10 | PE.RRVVAQG PEEEFGRSLI KHNSCIVTTQ NGKFTGLGIY DRMLILPTHA |
| ef173414-11 | PE.RRVVAQG PEEEFGRSLI KHNSCVVTTQ NGKFTGLGIY DRTIVIPTHA |
| ef173415-12 | PE.RRVVIQG PVEEFGRSLI KHNTRIVTTK NGKFTGLGIY DNLMVIPTHA |
| hrv-13 | PE.RRVVAQG PEEEFGRSII KHNTCVVTTD NGKFTGLGIY DKLMILPTHA |
| hrv-13-f03 | PE.RRVVAQG PEEEFGRSII KHNTCVVTTD NGKFTGLGIY DKLMVLPTHA |
| dq473493-15 | PE.RRVVAQG PEEEFGRSLI KHNTCVVTTD NGKFTGLGIY DRYMIVPTHS |
| l24917-16 | PE.RRVVAQG PEEEFGMSII KNNTCVVTTT NGKFTGLGIY DRILILPTHA |
| hrv-18 | PE.RRVVAQG PEEEFGRSLI KHNSCIVTTQ NGKFTGLGIY DRTLIIPTHA |
| hrv-19 | PE.RRVVAQG PEEEFGRSLI KHNTCVVTTD NGKFTGLGIY DRVMILPTHA |
| hrv-20 | PE.RRVVTQG PQEEFGRSLI KHNTCVVTTD NGKFTGLGIY DNIMIIPTHA |
| hrv-21 | PE.RRVVAQG PEEEFGRSLI KHNSCVVTTQ NGKFTGLGIY DRTLIIPTHA |
| hrv-22 | PE.RRVVAQG PEEEFGRSLI KHNTCVVTTD NGKFTGLGIY DRVMILPTHA |
| dq473497-23 | PE.RRVVAQG PEGEFGMSLI KHNSCVVTTE NGKFTGLGIY DRTLIVPTHA |
| hrv-24 | PE.RRVVAQG PEEEFGRSLI KHNSCIVTTQ NGKFTGLGIY DRVLIIPTHA |
| ef173416-24 | PE.RRVVAQG PEEEFGRSLI KHNSCIVTTQ NGKFTGLGIY DRVLIIPTHA |
| hrv-25 | PE.RRVVAQG PEEEFGRSLI KHNSCVVSTQ NGKFTGLGIY DRTLILPTHA |
| dq473508-28 | PE.RRVVTQG PQEEFGRSLI KHNTCVVTTN NGKFTGLGIY DNVMIIPTHA |
| hrv-29 | PE.RRVVAQG PEEEFGRSLI KHNSCVVSTQ NGKFTGLGIY DRTLILPTHA |
| dq473512-30 | PE.RRVVAQG PEEEFGLSLI KHNSCVVTTE NGKFTGLGIH DRIMIVPTHA |
| hrv-30 | PE.RRVVAQG PEEEFGLSLI KHNSCVVTTE NGKFTGLGIH DRIMIVPTHA |
| hrv-31 | PE.RRVVAQG PEEEFGRSLI KHNSCIVTTQ NGKFTGLGIY DRTLVLPTHA |
| hrv-32 | PE.RRVVAQG PEEEFGRSLI KHNTCVITTD NGKFTGLGIY DKYMIIPTHA |
| hrv-33 | PE.RRVVAQG PEEEFGRSLI KHNSCVVTTQ NGKFTGLGIY DRTIIIPTHA |
| hrv-34 | PE.RRVVAQG PEEEFGRSLI KHNSCVVTTE NGKFTGLGIY DRTLIVPTHA |
| dq473501-34 | PE.RRVVAQG PEEEFGRSLI KHNSCVVTTE NGKFTGLGIY DRTLIVPTHA |
| dq473505-36 | PE.RRVVTQG PEEEFGRSLL KHNCCIVTTD KGKFTGLGIY DQVMVLPTHS |
| hrv-38 | PE.RRVVAQG PEEEFGRSLI KHNSCIVTTQ NGKFTGLGIY DRTLIIPTHA |
| dq473495-38 | PE.RRVVAQG PEEEFGRSLI KHNSCIVTTQ NGKFTGLGIY DRTLIIPTHA |
| ay751783-39 | PE.RRVVAQG PEEEFGRSLI KHNSCVVTTQ NGKFTGLGIY DRVMIIPTHA |
| hrv-40 | PE.RRVVAQG PEEEFGRSLI KHNSCVVTTS NGKFTGLGIY DRTLIIPTHA |
| dq473491-41 | PE.RRVVAQG PEEEFGRSLI KHDTCVVTTD NGKFTGLGIY DKLMVLPTHA |
| hrv-43 | PE.RRIVAQG PEEEFGRSLI KHNTCVVTTD NGKFTGLGIY DKLMILPTHA |
| dq473499-44 | PE.RRVVAQG PEEEFGRSLI KHNSCVVSTQ NGKFTGLGIY DRTLILPTHA |
| hrv-45 | PE.KRVVVQG PSTEFGLSLI KHNTCIVETE NGKFTGLGIY DNLLVIPTHA |
| dq473506-46 | PE.RRVVTQG PQEEFGRSLI KHNTCVVTTS NGKFTGLGIY DNVMIIPTHA |
| hrv-47 | PE.RRVVAQG PEEEFGRSLI KHNSCIVTTQ NGKFTGLGIY DRTLILPTHA |
| dq473496-49 | PE.RRVVAQG PEEEFGMSLI KHNSCVITTE NGKFTGLGIY DKFVVVPTHA |
| hrv-49-f04 | PE.RRVVAQG PEEEFGMSLI KHNSCVITTD NGKFTGLGIY DKFVVVPTHA |
| hrv-50 | PE.RRVVAQG PEEEFGRSLI KHNSCVVTTE NGKFTGLGIY DRTLIIPTHA |
| hrv-51 | PE.RRIVTQG PQEEFGRSLL KHNACIVTTE NGKFTGLGIY DNVMILPTHA |
| dq473507-53 | PE.RRVVTQG PQEEFGRSLM KHNTCVVTTN NGKFTGLGIY DNVMIIPTHA |
| hrv-54 | PE.RRVVAQG PEEEFGRSLI KHNSCVVTTS NGKFTGLGIY DRTLIVPTHA |
| hrv-54-f05 | PE.RRVVAQG PEEEFGRSLI KHNSCVVTTS NGKFTGLGIY DRTLIVPTHA |
| dq473511-55 | PE.RRVVAQG PEEEFGRSLI KHNSCVVTTS NGKFTGLGIY DRTLIVPTHA |
| hrv-56 | PE.RRVVAQG PEEEFGRSLI KHNSCIVTTQ NGKFTGLGIY DRVLILPTHA |
| hrv-57 | PE.RRVVAQG PEEEFGRSLI KHNSCVVTTQ NGKFTGLGIY DRVLIIPTHA |
| hrv-58 | PE.RRVVTQG PEEEFGRSLL KHNCCIVTTD KGKFTGLGIY DQVMVLPTHS |
| dq473500-59 | PE.RRVVAQG PEEEFGRSLI KHNSCVVTTQ NGKFTGLGIY DRTIIIPTHA |
| hrv-60 | PE.RRVVAQG PEEEFGRSLI KHNSCVVTTS NGKFTGLGIY DRTLIIPTHA |
| hrv-61 | PE.RRVVTQG PEEEFGRSLI KHNTCVVTTD NGKFTGLGIY DKLMILPTHA |
| hrv-62 | PE.RRVVAQG PEEEFGRSLI KHNSCVVSTQ NGKFTGLGIY DRTLILPTHA |
| hrv-63 | PE.RRVVAQG PEEEFGRSLI KHNSCIVTTQ NGKFTGLGIY DRVLILPTHA |
| hrv-64 | PE.RRVVAQG PEEEFGRSLI KHNTCVVTTE NGKFTGLGIY DKIMILPTHA |
| ef173417-64 | PE.RRVVAQG PEEEFGRSLI KHNTCVVTTE NGKFTGLGIY DKIMILPTHA |
| hrv-65 | PE.RRVVTQG PQEEFGRSLL KHNACIVTTD NGKFTGLGIY DNVMILPTHA |
| hrv-66 | PE.RRVVAQG PEEEFGRSLI KHNSCIVTTS NGKFTGLGIY DRTLIIPTHA |
| hrv-67 | PE.RRVVAQG PEEEFGRSLI KHNTCVVTTD NGKFTGLGIY DRYLIIPTHA |
| hrv-68 | PE.RRVVTQG PQEEFGRSLI KHNTCVVTTS NGKFTGLGIY DNIMIIPTHA |
| hrv-71 | PE.RRVVTQG PQEEFGRSLL KHNACIVTTE NGKFTGLGIY DNVMIIPTHA |
| dq473492-73 | PE.RRVVAQG PEEEFGRSLI KHNTCVVTTD NGKFTGLGIY DKLMILPTHA |
| dq473494-74 | PE.RRIVAQG PEEEFGRSLI KHNTCVVTTE NGKFTGLGIY DRIMIVPTHS |
| dq473510-75 | PE.RRIVAQG PEEEFGRSLI KHNTCVVTTE NGKFTGLGIY DKVMILPTHA |
| dq473502-76 | PE.RRVVAQG PEEEFGRSLI KHNSCVVTTQ NGKFTGLGIY DRTIIIPTHA |
| hrv-76 | PE.RRVVAQG PEEEFGRSLI KHNSCVVTTQ NGKFTGLGIY DRTIIIPTHA |
| hrv-77 | PE.RRVVAQG PEEEFGRSLI KHNSCVVTTS NGKFTGLGIY DRTLILPTHA |
| hrv-78 | PE.RRVVTQG PVEEFGRSLI KHNTCVVTTE NGKFTGLGVH DNVMIIPTHS |
| ef173418-78 | PE.RRVVTQG PVEEFGRSLI KHNTCVVTTE NGKFTGLGVH DNVMIIPTHS |
| hrv-80 | PE.RRVVTQG PQEEFGRSII KHNTCVLTTN NGKFTGLGIH DNFMVIPTHA |
| hrv-81 | PE.RRVVAQG PEEEFGMSII KNNTCVVTTA NGKFTGLGIY DKILIIPTHA |
| hrv-81-f06 | PE.RRVVAQG PEEEFGMSII KNNTCVVTTA NGKFTGLGIY DKILIIPTHA |
| hrv-81-f07 | PE.RRVVAQG PEEEFGMSII KNNTCVVTTA NGKFTGLGIY DKILIIPTHA |
| hrv-82 | PE.RRVVAQG PEEEFGRSLI KHNTCVVTTD NGKFTGLGIY DKTMIIPTHA |
| dq473509-82 | PE.RRVVAQG PEEEFGRSLI KHNTCVVTTE NGKFTGLGIY DKTMIIPTHA |
| hrv-85 | PE.RRVVAQG PEEEFGRSLI KHNSCIVTTS NGKFTGLGIY DRTLIIPTHA |
| pico-85 | PE.RRVVAQG PEEEFGRSLI KHNSCIVTTS NGKFTGLGIY DRTLIIPTHA |
| dq473504-88 | PE.RRVVTQG PEEEFGRSLL KHNCCTVTTD KGKFTGLGIY DQIMVLPTHS |
| a10937-89 | PE.RRVVTQG PEEEFGRSLL KHNCCVVTTD KGKFTGLGIY DQVMVLPTHS |
| hrv-89 | PE.RRVVTQG PEEEFGRSLL KHNCCVVTTD KGKFTGLGIY DQVMVLPTHS |
| hrv-89-f08 | PE.RRVVTQG PEEEFGRSLL KHNCCVVTTD KGKFTGLGIY DQVMVLPTHS |
| hrv-89-f09 | PE.RRVVTQG PEEEFGRSLL KHNCCVVTTD KGKFTGLGIY DQVMVLPTHS |
| m16248-89 | PE.RRVVTQG PEEEFGRSLL KHNCCVVTTD KGKFTGLGIY DQVMVLPTHS |
| hrv-90 | PE.RRVVAQG PEEEFGRSLI KHNSCVVTTQ NGKFTGLGIY DRVIIVPTHA |
| hrv-94 | PE.RRVVAQG PEEEFGRSLI KHNTCVVTTD NGKFTGLGIY DRVMILPTHA |
| ef173419-94 | PE.RRVVAQG PEEEFGRSLI KHNTCVVTTD NGKFTGLGIY DRVMILPTHA |
| hrv-95 | PE.KRIVVQG PTTEFGLSLI KHNTCVVETD NGKFTGLGIF DNVLVIPTHA |
| hrv-96 | PE.RRVVAQG PEEEFGRSLI KHNTCVVTTD NGKFTGLGIY DRLMILPTHA |
| hrv-98 | PE.RRVVAQG PEEEFGRSLI KHNSCVVTTS NGKFTGLGIY DRTLIIPTHA |
| hrv-100 | PE.RRVVAQG PEEEFGRSLI KHNSCVVTTN NGKFTGLGIY DRTLIIPTHA |
| ef186077-qpm | PELRKAVIQG PEHEFGMALI KRNCHIATTD RGDFNLLGVY DNCAVIPTHA |
| ef077279-nat001 | PELRKAVVQG PEHEFGMALI KRNCHIATTD RGGFNLLGIY DNCAVIPTHA |
| ny1078 | PELRRAVAQG PEHEFGMALL KRNCHIATTD RGDFNLLGIH DNCAVLPTHA |
| ef582385-c024 | PELRRATLQG PEHEFLNALI RRNCHIITTD KGEFNLLGIY SNCAVVPTHA |
| ef077280-nat045 | SELRKAVTQG PEHEFMYALL KRNCHIAETR KGEFNLLGIH SNCAVIPTHA |
| ef582387-c026 | PELRKAVIQG PEHEFGMALI KRNCHIATTD RGDFNLLGVY DNCAVIPTHA |
| ef582386-c025 | PELRKAVKQG PEHEFVHSLI RRNCHVATTS RGDFNLLGIH DNCAVLPTHA |
| dq473485-03 | PTLKPVVVQG PNTEFALSLL RKNILTITTE KGEFTSLGIH DRICVLPTHA |
| ef173422-03 | PTLKPVVVQG PNTEFALSLL RKNILTITTE KGEFTSLGIH DRICVLPTHA |
| dq473490-04 | PTLRAVVTQG PNTEFALSLL RKNIVTVTTS KGEFTGLGIY DRILVIPTHA |
| hrv-05 | PTLRAVVTQG PNTEFALSLL RKNIVTVTTD KGEFTGLGIY ERVLVIPTHA |
| dq473486-06 | PSLRPVVVQG PNTEFALSLL RKNIVTITTE KGEFTGLGIY DRVCVIPTHA |
| l05355-14 | PTLRPVVVQG PNTEFALSLL RKNIMTITTS KGEFTGLGIH DRVCVIPTHA |
| k02121-14 | PTLRPVVVQG PNTEFALSLL RKNIMTITTS KGEFTGLGIH DRVCVIPTHA |
| ef173420-17 | PTLRQVVVQG PNTEFALSLL RKNIVTITTT KGEFTALGVH DRVCVVPTHS |
| hrv-26 | PTLRAVVTQG PNTEFALSLL RKNIVTVTTD KGEFTGLGVY DRLLVIPTHA |
| hrv-27 | PVLRAVVTQG PNTEFALSLL RKNIVTITTA KGEFTALGIY DRICVIPTHS |
| ef173421-27 | PVLRAVVTQG PNTEFALSLL RKNIVTITTA KGEFTALGIY DRICVIPTHS |
| dq473487-35 | PTLRPVVAQG PNTEFALSLL RKNIVTITTE KGEFTGLGIY DQICVIPTHA |
| hrv-35 | PTLRPVVAQG PNTEFALSLL RKNIVTITTE KGEFTGLGIY DQICVIPTHA |
| ef173423-37 | PSLRPVMVQG PNTEFALSLL RKNIVTITTE KGEFTGLGIY DRVCVIPTHA |
| hrv-42 | PTLRAVVTQG PNTEFALSLL RKNIVTVTTD KGEFTGLGIH ERILVIPTHA |
| dq473488-48 | PTLRQVVVQG PNTEFALSLL RKNIVTITTS KGEFTALGIH DRVCVVPTHS |
| hrv-52 | PTLRQVVVQG PNTEFAMSLL RKNIVTVTTT KGEFTALGIH DRVCVVPTHS |
| hrv-52-f10 | PTLRQVVVQG PNTEFAMSLL RKNIVTVTTT KGEFTALGIH DRVCVVPTHS |
| ef173424-52 | PTLRQVVVQG PNTEFAMSLL RKNIVTVTTT KGEFTALGIH DRVCVVPTHS |
| hrv-69 | PTLRQVVVQG PNTEFAMSLL RKNIVTITTS KGEFTALGVH DRVCVVPTHS |
| dq473489-70 | PTLRQVVVQG PNTEFALSLL RKNIVTITTT KGEFTALGIH DRVCVVPTHS |
| hrv-72 | PTLRPVIVQG PNTEFALSLL RKNIVTITTD KGEFTGLGIY DHICVIPTHA |
| hrv-79 | PTLRPVIVQG PNTEFALSLL RKNVVTITTE KGEFTGLGVY DHVCVIPTHA |
| hrv-83 | PTLRPVIVQG PNTEFALSLL RKNIVTITTE KGEFTGLGVY DQICVLPTHA |
| hrv-84 | PTLRAVVTQG PNTEFALSLL RKNIITVTTS KGEFTSLGIY DRICVIPTHS |
| hrv-86 | PTLRPVVVQG PNTEFALSLL RKNIVTITTE KGEFTGLGIY DRVCVVPTHS |
| hrv-91 | PTLRQVVVQG PNTEFALSLL RKNIITITTA KGEFTALGIY DRVCVVPTHS |
| hrv-92 | PTLRPIVVQG PNTEFALSLL RKNIVTITTE KGEFTGLGVY DHVCVVPTHA |
| ef173425-93 | PVLRAVVTQG PNTEFALSLL RKNIITITTS KGEFTALGIY DRICVIPTHS |
| hrv-97 | PVLRAVVTQG PNTEFALSLL RKNIVTITTA KGEFTALGIY DRICVIPTHS |
| hrv-99 | PTIRAVMTQG PNTEFALSLL RKNIVTVTTN KGEFTGLGIY DKILVVPTHA |
| | 1651 1700 |
| annotation | ...BBBB... BBBBBBBBBB BBB...BBBE BBBBBBB... ...HHHHHH. |
| af499637-cva13 | APGETVMIDG KEVEIIDAKA LEDQAGTNLE ITIITLKRNE KFRDIRPHIP |
| af546702-cva21 | APGETIIIDG KEVEILDARA LEDQAGTNLE ITIITLKRNE KFRDIRSHIP |
| v01149-pv1m | SPGESIVIDG KEVEILDAKA LEDQAGTNLE ITIITLKRNE KFRDIRPHIP |
| d00239-01 | DPGREVQVNG IHTKVLDSYD LYNRDGVKLE ITVIQLDRNE KFRDIRKYIP |
| pico-01 | DPGREVQVMG VHTKVLDSYD LYNRDGVKLE ITVIQLDRNE KFRDIRKYIP |
| hrv-01 | DPGREVQVNG VHTKVLDSYD LYNRDGVKLE ITVIQLDRNE KFRDIRKYIP |
| x02316-02 | DPGKEIQVDG ITTKVIDSYD LYNKNGIKLE ITVLKLDRNE KFRDIRRYIP |
| hrv-07 | DPGSEILIDG VKVKILDSYD LHNHEGIKLE ITVIKLDRNE KFRDIRKYLP |
| dq473503-07 | DPGSEILIDG VKVKILDSYD LHNHEGIKLE ITVIKLDRNE KFRDIRKYLP |
| hrv-08 | DPGKSVNIDG VEVKVVDSYD LFNKEGVKLE ITVILLSRNE KFRDIRKYIP |
| pico-09 | DPGKTVQING IVTNVVDSYD LHNKDGINLE ITVIKLDRNE KFRDIRKYIP |
| hrv-09 | DPGKTVQING IVTNVVDSYD LHNKDGIKLE ITVIKLDRNE KFRDIRKYIP |
| hrv-09-f01 | DPGKTVQING IVTNVVDSYD LHNKDGIKLE ITVIKLDRNE KFRDIRKYIP |
| hrv-09-f02 | DPGKTVQING IVTNVVDSYD LHNKDGIKLE ITVIKLDRNE KFRDIRKYIP |
| dq473498-10 | DPGREVQIDG ITTKVEDSFD LYNKDGVKLE ITVLKLKRNE KFKDIRKYIP |
| hrv-10 | DPGREVQIDG ITTKVEDSFD LYNKDGVKLE ITVLKLKRNE KFKDIRKYIP |
| ef173414-11 | DPGEEVQIDG ITTKVEDSYD LYNKDGIKLE ITVLKLQRNE KFRDIRKYIP |
| ef173415-12 | DPEKVVQIDG INVNVTDSYD LCNKQGVKLE ITVIKLDQNE KFRDIRKFIP |
| hrv-13 | DPGKEVCING IATKVSDSYD LYNKQGVKLE ISAIVLDRNE KFRDIRKYIP |
| hrv-13-f03 | DPGKEVCING ITTKVSDSYD LYNKQGVKLE ITAIVLDRNE KFRDIRKYIP |
| dq473493-15 | DPGKVVQVDG INTNVLDAYD LHNKDGIKLE ITVIKLDRNE KFRDIRKYIP |
| l24917-16 | DPGSEIQVNG IHTKVLDSYD LFNKEGVKLE ITVLKLDRNE KFRDIRKYIP |
| hrv-18 | DPGKEVQIDG ITTEVQDSYD LYNKDGVKLE ITVLKLKRNE KFKDIRKYIP |
| hrv-19 | DPGKTLQING INTSVTDSYD LYNKDGIKLE ITVVKLDRNE KFRDIRKYIP |
| hrv-20 | DAGKEVEIDG IKTQVDDAYD LHNSQGIKLE ITVLKLHRNE KFRDIRKYIP |
| hrv-21 | DPGKEVQIDG IATKVEDSYD LFNKDGVKLE ITVLKLKRNE KFKDIRKYIP |
| hrv-22 | DPGKIIQVNG INTTVCDSYD LYNKNGIKLE ITVVKLDRNE KFRDIRKYIP |
| dq473497-23 | DPGKEIQIDG ITTKVIDSYH LYNKDGIKLE ITVLKLDRNE KFRDIRKYIP |
| hrv-24 | DPGREVQIDG INTTVEDSYD LYNKDGIKLE ITVLKLKRNE KFKDIRKYLP |
| ef173416-24 | DPGREVQIDG INTTVEDSYD LYNKDGIKLE ITVLKLKRNE KFKDIRKYLP |
| hrv-25 | DPGNEIQIDG IATKVEDSYD LYNKDGVKLE ITVLKLKRNE KFKDIRKYIP |
| dq473508-28 | DAGREVEIDG IKTQIDDAYD LHNSQGVKLE ITVLKLHRNE KFRDIRKYIP |
| hrv-29 | DPGSEVQIDG ITTKVEDSFD LYNKDGVKLE ITVLKLKRNE KFKDIRKYIP |
| dq473512-30 | DPGKEIQIDG ITTKVTDSYD LYNKDGIKLE ITVLKLDRNE KFRDIRKYIP |
| hrv-30 | DPGKEIQIDG ITTKVTDSYD LYNKDGIKLE ITVLKLDRNE KFRDIRKYIP |
| hrv-31 | DPGNEIQIDG ITTKVEDSYD LFNKDGIKLE ITVLKLKRNE KFKDIRKYIP |
| hrv-32 | DPGKTVQING IITNVIDSYD LHNKDGVKLE ITVIKLDRNE KFRDIRKYIP |
| hrv-33 | DPGKEVQIDG ISTKVEDSYD LYNKDGIKLE ITVLKLQRNE KFRDIRKYIP |
| hrv-34 | DPGKEVQIDG ITTKVEDSFD LFNKDGVKLE ITVLKLKRNE KFKDIRKYIP |
| dq473501-34 | DPGKEVQIDG ITTKVEDSFD LFNKDGVKLE ITVLKLKRNE KFKDIRKYIP |
| dq473505-36 | DPGSEILVDG VKVKISDSYD LHNHEGVKLE ITVVKLVRNE KFKDIRKYLP |
| hrv-38 | DPGNEVQIDG ITTKVEDSYD LFNKDGVKLE ITVLKLKRNE KFKDIRKYIP |
| dq473495-38 | DPGNEVQIDG ITTKVEDSYD LFNKDGVKLE ITVLKLKRNE KFKDIRKYIP |
| ay751783-39 | DPDKEVQIDG ITTKVLDSYD LYNKDGVKLE ITVLKLDRNE KFRDIRKYIP |
| hrv-40 | DPGKEVQIDG ITTEVQDSYD LYNKDGIKLE ITVLKLKRNE KFKDIRKYIP |
| dq473491-41 | DPSSMIYVNG IATKVKDSYD LYNKQGIKLE ITVVILDRNE KFRDIRKYIP |
| hrv-43 | DPGKEIYING IKVKVSDSYD LYNKDGVKLE ITVVKLDRNE KFRDIRRYIP |
| dq473499-44 | DPGSEVQIDG IATKVEDSFD LYNKDGVKLE ITVLKLKRNE KFKDIRKYIP |
| hrv-45 | DPSRTVKVDG VETEVLDSYD LYNKEGVKLE ITVLILSRNE KFRDIRKYIP |
| dq473506-46 | DAGQEVEIDG IKTKVSDAYD LHNMHGVKLE ITVLKLSRNE KFRDIRKYIP |
| hrv-47 | DPGGEIQIDG ITTKVEDSYD LFNKDGIKLE ITVLKLKRNE KFKDIRKYIP |
| dq473496-49 | DPGKEIQVDG ITTKVADSYD LYNKDGIKLE ITVLKLDRNE KFRDIRKYIP |
| hrv-49-f04 | DPGKEIQVDG ITTKVADSFD LYNKDGIKLE ITVLKLDRNE KFRDIRKYIP |
| hrv-50 | DPGKEVQIDG ITTKVEDSYD LFNKDGVKLE ITVLKLKRNE KFKDIRKYIP |
| hrv-51 | DVGRTVDIDG IQTKVADAYD LHNSQGVKLE ITVVKLNRNE KFRDIRKYIP |
| dq473507-53 | DAGQEVEVDG IKTKVSDAYD LYNTQGVKLE ITVLKLNRNE KFRDIRKYIP |
| hrv-54 | DPGKEVQIDG ITTEVQDSYD LYNRDGIKLE ITVLKLKRNE KFKDIRKYIP |
| hrv-54-f05 | DPGKEVQIDG ITTEVQDSYD LYNKDGIKLE ITVLKLKRNE KFKDIRKYIP |
| dq473511-55 | DPGKEIQVDG ITTKVEDSYD LFNKDGVKLE ITVLKLKRNE KFKDIRKYIP |
| hrv-56 | DPGHEVQIDG ITTKVEESFD LFNKDGVKLE ITVLKLKRNE KFKDIRKYIP |
| hrv-57 | DPGKEVQIDG ITTGVEDSYD LFNKDGVKLE ITVLKLKRNE KFKDIRKYIP |
| hrv-58 | DPGSEILVDG VKVKISDSYD LHNHEGIKLE ITVVKLVRNE KFKDIRKYLP |
| dq473500-59 | DPGGEVQIDG IVTKVEDSYD LFNKDGIKLE ITVLKLKRNE KFRDIRKYIP |
| hrv-60 | DPGKEVQIDG ITTTVQDSYD LYNKDGVKLE ITVLKLKRNE KFKDIRKYIP |
| hrv-61 | DPGKEIYING IATRVSDSYD MYNKQGIKLE ITAVLLDRNE KFRDIRRYIP |
| hrv-62 | DPGNEIQIDG ITTKVEGSYD LYNKEGVKLE ITVLKLKRNE KFKDIRKYIP |
| hrv-63 | DPGHEVQIDG ITTKVEDSFD LFNKDGVKLE ITVLKLKRNE KFKDIRKYIP |
| hrv-64 | DPGKTIQING INTNVLDSYD LYNKNGVKLE ITVVKLDRNE KFRDIRKYIP |
| ef173417-64 | DPGKTIQING INTNVLDSYD LYNKNGVKLE ITVVKLDRNE KFRDIRKYIP |
| hrv-65 | DAGKTIDING IQTRVADAYD LYNSQGVKLE ITVVKLDRNE KFRDIRKYIP |
| hrv-66 | DPGKEVQIDG ITTKVEDSYD LYNKDGVKLE ITVLKLKRNE KFKDIRKYIP |
| hrv-67 | DPGKTVQING IITNVTDSYD LHNKEGIKLE ITVIKLDRNE KFRDIRKYIP |
| hrv-68 | DAGKEVEIDG IKTQIDDAYD LYNSQGIKLE ITVLKLHRNE KFRDIRKYIP |
| hrv-71 | EVGKSVEIDG IQVKVSDSYD LYNSHGVKLE ITVVKLNRNE KFRDIRKYIP |
| dq473492-73 | DPGKEVYING IATKVSDSYD LYNKQGVKLE ITAIVLDRNE KFRDIRKYIP |
| dq473494-74 | DPGTTIQIDG INTKVLDSYD LHNKDGIKLE ITVIKLDRNE KFRDIRKYIP |
| dq473510-75 | DPGKQVQING INVNVSDSYD LYNKDGVKLE ITVIKLDRNE KFRDIRKYIP |
| dq473502-76 | DPGKEVQIDG ISTKVEDSYD LYNKDGVKLE ITVLKLQRNE KFRDIRKYIP |
| hrv-76 | DPGKEVQIDG ISTKVEDSYD LYNKDGVKLE ITVLKLQRNE KFRDIRKYIP |
| hrv-77 | DPGREIQVDG ITTEVQDSYD LYNKDGVKLE ITVLKLKRNE KFKDIRKYIP |
| hrv-78 | EPGSQIEIDG VKTNVVDSYD LYNKDGVKLE ITVVKLNRNE KFRDIRKYLP |
| ef173418-78 | EPGSQIEIDG VKTNVVDSYD LYNKDGVKLE ITVVKLNRNE KFRDIRKYLP |
| hrv-80 | DVGGEIEVDG IKTKVLDSYD LYNKQGVKLE ITVIKLDRNE KFRDIRKYIP |
| hrv-81 | DPGSEIQVNG IHTKILDSYD LYNKEGVKLE ITVLKLDRNE KFRDIRKYIP |
| hrv-81-f06 | DPGSEIQVNG IQTKILDSYD LFNKEGVKLE ITVLKLDRNE KFRDIRKYIP |
| hrv-81-f07 | DPGSEIQVNG IQTKILDSYD LFNKEGVKLE ITVLKLDRNE KFRDIRKYIP |
| hrv-82 | DPGNTIQIDG INVKISDSYD LYNKNGVKLE ITVIKLDRNE KFRDIRKYIP |
| dq473509-82 | DPGKTIQIDG INVKISDSYD LYNKNGVKLE ITVVKLDRNE KFRDIRKYIP |
| hrv-85 | DPGKEVQIDG ITTQVQDSYD LYNKDGIKLE ITVLKLKRNE KFKDIRKYIP |
| pico-85 | DPGKEVQIDG ITTQVQDSYD LYNKDGIKLE ITVLKLKRNE KFKDIRKYIP |
| dq473504-88 | DPGSEVMIDG VKIKVLDSYD LHNHEGVKLE ITVIKLARNE KFKDIRKYLP |
| a10937-89 | DPGSEILVDG VKVKVSDSYD LHNHEGVKLE ITVVKLIRNE KFKDIRKYLP |
| hrv-89 | DPGSEILVDG VKVKVSDSYD LHNHEGVKLE ITVVKLIRNE KFKDIRKYLP |
| hrv-89-f08 | DPGSEILIDG VKVKVSDSYD LHNHEGVKLE ITVVKLARNE KFKDIRKYLP |
| hrv-89-f09 | DPGSEILIDG VKVKVSDSYD LHNHEGVKLE ITVVKLARNE KFKDIRKYLP |
| m16248-89 | DPGSEILVDG VKVKVSDSYD LHNHEGVKLE ITVVKLIRNE KFKDIRKYLP |
| hrv-90 | DPGKEIQIDG ISTKVEDSYD LYNKDGIKLE ITVLKLKRNE KFKDIRKYIP |
| hrv-94 | DPGKTIQING INTNVTDSYD LYNKNGIKLE ITVVKLDRNE KFRDIRKYIP |
| ef173419-94 | DPGKTIQING INTNVTDSYD LYNKNGIKLE ITVVKLDRNE KFRDIRKYIP |
| hrv-95 | DPGKSVNIDG VEVKVVDSYD LFNKEGVKLE ITVILLSRNE KFRDIRKYIP |
| hrv-96 | DPGKEISING IVTKVSDSYD MYNKQGIKLE ITAVVLDRNE KFRDIRKYIP |
| hrv-98 | DPGKEVQIDG ITTEVQDSYD LYNKDGIKLE ITVLKLKRNE KFKDIRKYIP |
| hrv-100 | DPGREVQIDG IATKVEDSYD LYNKDGIKLE ITVLKLKRNE KFKDIRKYIP |
| ef186077-qpm | QPEDTILIDG VETKILKQTI ITDENDVDTE VTILWLDRNE KFRDIRRFIP |
| ef077279-nat001 | QVEDTILIDG VETKVLKQTI VTDENDVDTE ITILWLDRNE KFRDIRRFIP |
| ny1078 | QADGTILIDG VETKILKQTI VTDESDVDTE ITILWLDRNE KFRDIRRFLP |
| ef582385-c024 | EPGDVVDIDG RLVRVLKQQV LTDMNDVDTE VTVLWLDQNE KFRDIRRFIP |
| ef077280-nat045 | ECDKEILIDG IPTKILKQQI ITDASDVDTE VTLLWLDRNE KFRDIRRFIP |
| ef582387-c026 | QPEDTILIDG VETKILKQTI ITDENDVDTE ITILWLDRNE KFRDIRRFIP |
| ef582386-c025 | ECGDTILIDN IQTKVIKQQI ITDSNDVDTE ITIVWLDRNE KFRDIRRFIP |
| dq473485-03 | QPGDNVLVNG QKIQIKDKYK LVDPDNTNLE LTIIELDRNE KFRDIRGFI. |
| ef173422-03 | QPGDNVLVNG QKIQIKDKYK LVDPDNTNLE LTIIELDRNE KFRDIRGFI. |
| dq473490-04 | QPSDQVLING FSTNVRDKWK LVDPDNLNLE ITVIELDRNE KFRDIRMFI. |
| hrv-05 | QPSDQVLING FATKIKDKWK LVDPDNLNLE ITVLELDRNE KFRDIRMFI. |
| dq473486-06 | QPDNKVLVNG QAVQIKDKYK LVDPDNINLE LTVLMLDRNE KFRDIRSFI. |
| l05355-14 | QPGDDVLVNG QKIRVKDKYK LVDPENINLE LTVLTLDRNE KFRDIRGFI. |
| k02121-14 | QPGDDVLVNG QKIRVKDKYK LVDPENINLE LTVLTLDRNE KFRDIRGFI. |
| ef173420-17 | QPDDEVLVNG QPVKLKDKYK LLDPENTNLE LTILILDRNE KFRDIRAFI. |
| hrv-26 | QPGEQVLING FSTKLKDKWK LVDPDDINLE ITVLELDRNE KFRDIRMFI. |
| hrv-27 | QPENEVLLNG YNVKIKDKWR LVDPDNLNLE ITVLELDRNE KFRDIRMFI. |
| ef173421-27 | QPENEVLLNG YNVKIKDKWR LVDPDNLNLE ITVLELDRNE KFRDIRMFI. |
| dq473487-35 | QPGDSVLVNG QKIQVRDKYK LVDPENVNLE LTILILDRNE KFRDIRNFI. |
| hrv-35 | QPGDSVLVNG QKIQVRDKYK LVDPENVNLE LTILILDRNE KFRDIRNFI. |
| ef173423-37 | QPGNSVLLNG QKIQIKDKYK LMDPDNINLE LTVLILDRNE KFRDIRNFI. |
| hrv-42 | QPSEKVLING FATNVKDKWK LVDPDNLNLE ITVLELDRNE KFRDIRMFI. |
| dq473488-48 | QPSDEVLING QTVKLKDKYK LLDPENTNLE LTILVLDRNE KFRDIRAFI. |
| hrv-52 | QPDDEVLVNG QPVKLKDKYK LMDPENTNLE LTIIVLDRNE KFRDIRAFI. |
| hrv-52-f10 | QPDDEVLVNG QPVKLKDKYK LMDPENTNLE LTIIVLDRNE KFRDIRAFI. |
| ef173424-52 | QPDDEVLVNG QPVKLKDKYK LMDPENTNLE LTIIVLDRNE KFRDIRAFI. |
| hrv-69 | QPGDEVLVNG QPIKLKDKYK LLDPENTNLE LTIVVLDRNE KFRDIRAFI. |
| dq473489-70 | QPDDEVLVNG QPVKLKDKYK LLDPENTNLE LTILVLDRNE KFRDIRAFI. |
| hrv-72 | QPNDSVLING QKVQIKDKFK LVDPDNINLE LTILDLNRNE KFRDIRAFI. |
| hrv-79 | QPSDSVLVNG QKIQIKDKYK LVDPENVNLE LTILVLDRNE KFRDIRGFI. |
| hrv-83 | QPTDNVLLNG QKVQIKDKYK LVDPENVNLE LTIITLDRNE KFRDIRGFI. |
| hrv-84 | QPEDEVLVNG FKTRVSDKWK LVDPDNMNLE ITVLQLDRNE KFRDIRSFI. |
| hrv-86 | HPGQEVLLNG QKIKVSDKYR LIDSDSINLE LTVLTLDRNE KFRDIRPFI. |
| hrv-91 | QPDDEVLVNG QPVKLKDKYK LLDSENTNLE LTILVLDRNE KFRDIRAFI. |
| hrv-92 | QPSESVLLNG QKVHLKDKYK LVDPENVNLE LTIIVLDRNE KFRDIRGFI. |
| ef173425-93 | QPENEVLLNG YNTKIKDKWR LVDPDNLNLE ITVLELDRNE KFRDIRMFI. |
| hrv-97 | QPENEVLLNG YNIKIKDKWK LIDPDNLNLE ITVLELDRNE KFRDIRMFI. |
| hrv-99 | QPTEEVLING FTVKIKDKWK LVDPDNLNLE ITVLELDRNE KFRDIRMFI. |
| | 1701 1750 |
| annotation | .......BBB BB......BB BBBBBBBBBB BBBBBB...B BBBBBBBB.. |
| af499637-cva13 | TQITETNDGV LIVNTSKYPN MYVPVGAVTE QGYLNLGGRQ TARTLMYNFP |
| af546702-cva21 | TQITETNDGV LIVNTSKYPN MYVPVGAVTE QGYLNLSGRQ TARTLMYNFP |
| v01149-pv1m | TQITETNDGV LIVNTSKYPN MYVPVGAVTE QGYLNLGGRQ TARTLMYNFP |
| d00239-01 | ETEDDYPECN LALSANQVEP TIIKVGDVVS YGNILLSGNQ TARMLKYNYP |
| pico-01 | ETEDDYPECN LALSANQDEP TIIKVGDVVS YGNILLSGNQ TARMLKYNYP |
| hrv-01 | ETEDDYPECN LALSANQDEP TIIKVGDVVS YGNILLSGNQ TARMLKYNYP |
| x02316-02 | NNEDDYPNCN LALLANQPEP TIINVGDVVS YGNILLSGNQ TARMLKYSYP |
| hrv-07 | TRDDDYLGCN LALLANQDEP TILNVGDAIS YGNILLSGTN TARMIKYHYP |
| dq473503-07 | TRDDDYLGCN LALLANQDEP TILNVGDAIS YGNILLSGTN TARMIKYHYP |
| hrv-08 | NSEDDYTNCN LALVANQEVP QILEVGDVVS YGNILLSGNN TARMLKYDYP |
| pico-09 | EREDDYPECN LALVANQIEP TIISVGDVIS YGNILLSGNQ TARMLKYHYP |
| hrv-09 | EREDDYPECN LALVANQVEP TIISVGDVIS YGNILLSGNQ TARMLKYHYP |
| hrv-09-f01 | EREDDYPECN LALVANQDEP TIISVGDVIS YGNILLSGNQ TARMLKYHYP |
| hrv-09-f02 | EREDDYPECN LALVANQDEP TIISVGDVIS YGNILLSGNQ TARMLKYHYP |
| dq473498-10 | ENEDDYPDCN LALSANQPET TIINVGDVVS YGNILLSGTQ TARMLKYNYP |
| hrv-10 | ENEDDYPDCN LALSANQPET TIINVGDVVS YGNILLSGTQ TARMLKYNYP |
| ef173414-11 | EREDDYPECN LALSANQPET TIINVGDVVS YGNILLSGNQ TARMLKYNYP |
| ef173415-12 | DREDDYPECH LALTANQEQP TILEVGDAVS YGNILLSGNE TARMIKYNYP |
| hrv-13 | EREDDYPDCN LALVANQPEP TIINVGDVIS YGNILLSGNQ TARMLKYNYP |
| hrv-13-f03 | EREDDYPDCN LALVANQPEP TIINVGDVIS YGNILLSGNQ TARMLKYNYP |
| dq473493-15 | ESEDDYPDCN LALVANQVEP TIISVGDVIS YGNILLSGSQ TARMLKYNYP |
| l24917-16 | ESEDDYPECN LALVANQTEP TIIKVGDVVS YGNILLSGTQ TARMLKYNYP |
| hrv-18 | EDEDDYPDCN LALSANQPET TIINVGDVVS YGNILLSGNQ TARMLKYNYP |
| hrv-19 | EKEDDYPDCN LALVANQPEP TILSVGDVVS YGNILLSGNQ TARMLKYNYP |
| hrv-20 | ETEDDYPECH LALVANQQEP TILEVGDCCS YGNILLSGNQ TARMIKYNYP |
| hrv-21 | ENEDDYPDCN LALSANQPET TIINVGDVIS YGNILLSGTQ TARMLKYNYP |
| hrv-22 | EREDDYPDCN LALVANQPEP TIINVGDVVS YGNILLSGDQ TARMLKYNYP |
| dq473497-23 | NNEDDYPDCN LALLANQPEP TIINVGDVVS YGNILLSGSQ TARMLKYNYP |
| hrv-24 | ENEDDYPDCS LALSANQPET TIINVGDVIS YGNILLSGNQ TARMLKYNYP |
| ef173416-24 | ENEDDYPDCS LALSANQPET TIINVGDVIS YGNILLSGNQ TARMLKYNYP |
| hrv-25 | ENEDDYPDCN LALSANQPET TIINVGDVVS YGNILLSGNQ TARMLKYNYP |
| dq473508-28 | ESEDDYPECH LALVANQQEP TILEVGDCCS YGNILLSGNQ TARMIKYNYP |
| hrv-29 | ENEDDYPDCN LALSANQPET TIINVGDVVS YGNILLSGNQ TARMLKYNYP |
| dq473512-30 | SNEDDYPDCN LALLANQPEP TIINVGDVVS YGNILLSGNQ TARMLKYNYP |
| hrv-30 | SNEDDYPDCN LALLANQPEP TIINVGDVVS YGNILLSGNQ TARMLKYNYP |
| hrv-31 | ENEDDYPDCN LALSANQPET TIINVGDVVS YGNILLSGNX TARMLKYNYP |
| hrv-32 | EREDDYPDCN LALVANQPEP TIINVGDVIS YGNILLSGNQ TARMLKYHYP |
| hrv-33 | EKEDDYPECN LALSANQPET TIISVGDVVS YGNILLSGNQ TARMLKYNYP |
| hrv-34 | EHEDDYPDCN LALSANQPET TIIKVGDVVS YGNILLSGNQ TARMLKYNYP |
| dq473501-34 | EHEDDYPDCN LALSANQPET TIIKVGDVVS YGNILLSGNQ TARMLKYNYP |
| dq473505-36 | SREDDYPACN LALLANQDEP TIINVGDAES YGNILLSGTN TARMIKYHYP |
| hrv-38 | ENEDDYPDCN LALSANQPET TIINVGDVIS YGNILLSGNQ TARMLKYNYP |
| dq473495-38 | ENEDDYPDCN LALSANQPET TIINVGDVIS YGNILLSGNQ TARMLKYNYP |
| ay751783-39 | ENEDDYPECN LALSANQPET TILNVGDVVS YGNILLSGNQ TARMLKYNYP |
| hrv-40 | ENEDDYPDCN LALSANQPET TIINVGDVVS YGNILLSGSQ TARMLKYNYP |
| dq473491-41 | EKEDDYPECN LALVANQPEP TIINVGDVIS YGNILLSGNQ TARMLKYHYP |
| hrv-43 | EKEDDYPECN LALVANQPEP TIINVGDVVS YGNILLSGNQ TARMLKYNYP |
| dq473499-44 | ENEDDYPDCN LALSANQPET TIINVGDVVS YGNILLSGNQ TARMLKYNYP |
| hrv-45 | NSEDDYVNCN LALVANQDMP QILEVGDVVS YGNILLSGNN TARMLKYEYP |
| dq473506-46 | ESEDDYPECC LALVANQTEP TILEVGDCCS YGNILLSGNQ TARMIKYNYP |
| hrv-47 | ENEDDYPDCN LALSANQPET TIINVGDVVS YGNILLSGNQ TARMLKYNYP |
| dq473496-49 | NNEDDYPDCN LALLANQPEP TIINVGDVIS YGNILLSGNQ TARMLKYSYP |
| hrv-49-f04 | NNEDDYPDCN LALLANQPEP TIINVGDVVS YGNILLSGNQ TARMLKYNYP |
| hrv-50 | ENEDDYPDCN LALSANQPET TIIRVGDVVS YGNILLSGNQ TARMLKYNYP |
| hrv-51 | DSEDDYPDCC LALLANQPEP TIIEIGDSCS YGNILLSGNQ TARMIKYNYP |
| dq473507-53 | ESEDDYPECC LALVANQVEP TILEVGDCCS YGNILLSGNQ TARMIKYNYP |
| hrv-54 | ENEDDYPDCN LALSANQPET TIINVGDVVS YGNILLSGNQ TARMLKYNYP |
| hrv-54-f05 | ENEDDYPDCN LALSANQPET TIINVGDVVS YGNILLSGNQ TARMLKYNYP |
| dq473511-55 | ESESDYPDCN LALSANQPET TILNVGDVIS YGNILLSGTQ TARMLKYNYP |
| hrv-56 | ENEDDYPDCN LALSANQPET TIINVGDVVS YGNILLSGTQ TARMLKYNYP |
| hrv-57 | EREDDYPDCN LALSANQPET TIINVGDVVS YGNILLSGNQ TARMLKYNYP |
| hrv-58 | SREDDYPACN LALLANQDEP TIINVGDAES YGNILLSGTN TARMIKYHYP |
| dq473500-59 | ESEDDYPDCS LALSANQPET TIINVGDVVS YGNILLSGNQ TARMLKYNYP |
| hrv-60 | ENEDDYPDCN LALSANQPET TIISVGDVVS YGNILLSGNQ TARMLKYNYP |
| hrv-61 | EREDDYPECN LALVANQPEP TIISVGDVIS YGNILLSGNQ TARMLKYNYP |
| hrv-62 | ESEDDYPDCN LALSANQPET TIINVGDVVS YGNILLSGNQ TARMLKYNYP |
| hrv-63 | ESEDDYPDCN LALSANQPET TIINVGDVVS YGNILLSGTQ TARMLKYNYP |
| hrv-64 | EREDDYPDCN LALVANQPEP TIINVGDVVS YGNILLSGNQ TARMLKYNYP |
| ef173417-64 | EREDDYPDCN LALVANQPEP TIINVGDVVS YGNILLSGNQ TARMLKYNYP |
| hrv-65 | DTEDDYPECC LALLANQPEP TIIEVGDSCS YGNILLSGNQ TARMIKYNYP |
| hrv-66 | ENEDDYPDCN LALSANQPET TIINVGDVVS YGNILLSGTQ TARMLKYSYP |
| hrv-67 | EREDDYPDCN LALVANQVEP TIISVGDVVS YGNILLSGNQ TARMLKYHYP |
| hrv-68 | ESEDDYPECH LALVANQQEP TILEVGDCCS YGNILLSGNQ TARMIKYNYP |
| hrv-71 | DSEDDYSDCC LALLANQPEP TIIEVGDSCS YGNILLSGTQ TARMIKYNYP |
| dq473492-73 | EREDDYPDCN LALVANQSEP TIINVGDVIS YGNILLSGNQ TARMLKYNYP |
| dq473494-74 | EREDDYPECN LALVANQIEP TIISVGDVVS YGNILLSGNQ TARMLKYNYP |
| dq473510-75 | EKEDDYPECN LALVANQPEP TIIGVGDVVS YGNILLSGNQ TARMLKYNYP |
| dq473502-76 | EKEDDYPECN LALSANQPET TIISVGDVVS YGNILLSGNQ TARMLKYNYP |
| hrv-76 | EKEDDYPECN LALSANQPET TIISVGDVVS YGNILLSGNQ TARMLKYNYP |
| hrv-77 | ENEDDYPDCN LALSANQPET TIINVGDVVS YGNILLSGNQ TARMLKYNYP |
| hrv-78 | EHEDDYMECN LALVANQEQP TIIEVGDVCS YGNILLSGTQ TARMLKYNYP |
| ef173418-78 | EHEDDYMECN LALVANQEQP TIIEVGDVCS YGNILLSGTQ TARMLKYNYP |
| hrv-80 | EVEDDYVDCC LALTANQSEP TILQVGDSVS YGNILLSGNQ TARMIKYNYP |
| hrv-81 | ETEDDYPECN LALVANQPEP TIIKVGDVIS YGNILLSGTQ TARMLKYNYP |
| hrv-81-f06 | ETEDDYPECN LALVANQPEP TIIKVGDVIS YGNILLSGTQ TARMLKYNYP |
| hrv-81-f07 | ETEDDYPECN LALVANQPEP TIIKVGDVVS YGNILLSGTQ TARMLKYNYP |
| hrv-82 | EKEDDYPDCN LALVANQPEP TILNVGDVVS YGNILLSGNQ TARMLKYNYP |
| dq473509-82 | EKEDDYPECN LALVANQPEP TILNVGDVVS YGNILLSGNQ TARMLKYNYP |
| hrv-85 | ENEDDYPDCN LALSANQPET TIINVGDVVS YGNILLSGNQ TARMLKYNYP |
| pico-85 | ENEDDYPDCN LALSANQPET TIINVGDVVS YGNIILSGNQ TARMLKYNYP |
| dq473504-88 | TREDDYPACN LALLANQDEP TILNVGDAIS YGNILLSGTN TARMIKYHYP |
| a10937-89 | SREDDYPACN LALLANQDEP TIISVGDAVS YGNILLSGTN TARMIKYHYP |
| hrv-89 | SREDDYPACN LALLANQDEP TIISVGDAVS YGNILLSGTN TARMIKYHYP |
| hrv-89-f08 | SREDDYPACN LALLANQDEP TIISVGDAVS YGNILLSGTN TARMIKYHYP |
| hrv-89-f09 | SREDDYPACN LALLANQDEP TIISVGDAES YGNILLSGTN TARMIKYHYP |
| m16248-89 | SREDDYPACN LALLANQDEP TIISVGDAVS YGNILLSGTN TARMIKYHYP |
| hrv-90 | ESEDDYPDCN LALSANQPET TIINVGDVVS YGNILLSGNQ TARMLKYNYP |
| hrv-94 | EREDDYPDCN LALVANQPEP TIINVGDVVS YGNILLSGDQ TARMLKYNYP |
| ef173419-94 | EREDDYPDCN LALVANQPEP TIINVGDVVS YGNILLSGDQ TARMLKYNYP |
| hrv-95 | NSEDDYTNCN LALVANQEVP QILEVGDVVS YGNILLSGNN TARMLKYDYP |
| hrv-96 | EGEDDYPECN LALVANQPEP TIINVGDVIS YGNILLSGTQ TARMLKYNYP |
| hrv-98 | ENEDDYPDCN LALSANQPET TIINVGDVVS YGNILLSGNQ TARMLKYNYP |
| hrv-100 | ENEDDYPDCN LALSANQPET TIINVGDVVS YGNILLSGNQ TARMLKYNYP |
| ef186077-qpm | DYQRDWQNMR LVTNVPKFPM LDIEIGDVIP YGDINLSGNP TTRLLKYDYP |
| ef077279-nat001 | DYQRDWQGMR LVTNVPKFPM FDAEVGDVIP YGDINLSGNP TTRLLKYDYP |
| ny1078 | DYQRDWQNMR LVTNVPKFPM LDIEVGDVVP YGDINLSGNP TTRLLKYDYP |
| ef582385-c024 | EHQQDWHNIH LATNVTKFPM LNVEVGHTVP YGEINLSGNA TCRLYKYDYP |
| ef077280-nat045 | ETIEEWHHIR LVTNVSKFPM FFADVGTATP YGEITLSGNP TCRLLKYDYP |
| ef582387-c026 | DYQRDWQNMR LVTNVPKFPM LDIEIGDVIP YGDINLSGNP TTRLLKYDYP |
| ef582386-c025 | EHIEEWRNMR LATNVPKFPM MDVEVGDVTP YGEINLSGNL TCRLLKYNYP |
| dq473485-03 | SEDLEGLDAT LVVHSNGFTN TILDVGPITM AGLINLSNTP TTRMIRYDYP |
| ef173422-03 | SEDLEGLDAT LVVHSNGFTN TILDVGPITM AGLINLSNTP TTRMIRYDYP |
| dq473490-04 | ADDPECNEAT LVINSNNFKD TILTVGTTTL AGIINLSNTP TARMIRYEFP |
| hrv-05 | ADDPECNEAS LVIHSNNFKD TILSVGTTTL AGIINLSNTP TARMIRYEFP |
| dq473486-06 | SEDMEGMEAT LVVHSNNFTN TILDVGPITM AGLINLSSTP TSRMIRYDYP |
| l05355-14 | SEDLEGVDAT LVVHSNNFTN TILEVGPVTM AGLINLSSTP TNRMIRYDYA |
| k02121-14 | SEDLEGVDAT LVVHSNNFTN TILEVGPVTM AGLINLSSTP TNRMIRYDYA |
| ef173420-17 | ADDPEGMEGT LVINSNNFKD TILEVGQLTF AGLINLSSVP TNRMIRYEYP |
| hrv-26 | ADEPECSDAT LVINSNNFKD TILSVGSTTL AGIINLSNTP TARMIRYEFP |
| hrv-27 | ADESECPDAS LVIHSNNYKD TIMSVGHITM AGIINLSNTP TARMIRYDYP |
| ef173421-27 | ADESECPDAS LVIHSNNYKD TIMSVGHITM AGIINLSNTP TARMIRYDYP |
| dq473487-35 | SEDVEGLEAT LVIHSNHFTN TILDVGPITM AGLINLSSTP TNRMIRYDYP |
| hrv-35 | SEDVEGLEAT LVIHSNHFTN TILDVGPITM AGLINLSSTP TNRMIRYDYP |
| ef173423-37 | SEDIEGMEAT LVVHSNNFTN TILEVGPITM AGLINLSSTP TSRMIRYDYP |
| hrv-42 | ADDPECNEAS LVIHSNNFKD TILTVGATTL AGIINLSNTP TARMIRYDFP |
| dq473488-48 | AEDPEGAEGT LVINSNNFKD TILEVGQLTF AGLINLSSVP TNRMIRYEYP |
| hrv-52 | AEDPEGMEGT LVINSNNFKD TILEVGQLTF AGLINLSSVP TNRMIRYEYP |
| hrv-52-f10 | AEDPEGMEGT LVINSNNFKD TILEVGQLTF AGLINLSSVP TNRMIRYEYP |
| ef173424-52 | AEDPEGMEGT LVINSNNFKD TILEVGQLTF AGLINLSSVP TNRMIRYEYP |
| hrv-69 | AEDPEGVEGT LVINSNNFRD TILEVGQLTF AGLINLSSVP TNRMIRYEYP |
| dq473489-70 | ADDPEGMEGT LVINSNNFKD TILEVGQLTF AGLINLSSVP TNRMIRYEYP |
| hrv-72 | SEDFEGVEAT LVVHSNNYTN TILEVGPVTM AGLINLSSTP TNRMIRYEYA |
| hrv-79 | SEDLEGLDAT LVIHSNNFTN TILDVGPITM AGLINLSSTP TNRMIRYDYP |
| hrv-83 | SEDLEGFDAS LVIHSNNFTN TILDVGPITM AGLINLSSTP TNRMIRYDYP |
| hrv-84 | AEDPECSEAT LVINSNNFKD TIITVGQATL VGMINLSNTP TTRMIRYDYP |
| hrv-86 | CEDPEGMEAT LVIHSNNFTN TILEVGQITM AGLINLSSTP TGRMIRYEYP |
| hrv-91 | ADDPEGMEGT LVINSNNFKD TILEVGQLTF AGLINLSSVP TNRMIRYEYP |
| hrv-92 | SEDAEGLDAS LVIHSNNYTN TILDVGPITM AGLINLSSTP TNRMIRYDYP |
| ef173425-93 | ADEVECPDAS LVIHSNNYKN TIMSVGHTTM AGIINLSNTP TARMIRYDYP |
| hrv-97 | ADDLECSEAS LVIHSNNYKN TIMSVGHITM AGIINLSNTP TARMIRYDYP |
| hrv-99 | ADEPECNEAS LVIHSNNFKD TILSVGSTTL AGIINLSSTP TARMIRYDFP |
| | 1751 1800 |
| annotation | .....C..BB BB..BBBBBB BBBB..BBBB BB.HHHHHH. .QGBBBBBBB |
| af499637-cva13 | TRAGQCGGVI TCTGKVIGMH VGGNGSHGFA AALKRSYFTQ SQGEIQWMKP |
| af546702-cva21 | TRAGQCGGII TCTGKVIGMH VGGNGSHGFA AALKRSYFTQ NQGEIQWMRS |
| v01149-pv1m | TRAGQCGGVI TCTGKVIGMH VGGNGSHGFA AALKRSYFTQ SQGEIQWMRP |
| d00239-01 | TKSGYCGGVL YKIGQILGIH VGGNGRDGFS AMLLRSYFTD TQGQIKISKH |
| pico-01 | TKSGYCGGVL YKIGQILGIH VGGNGRDGFS AMLLRSYFTD TQGQIKVNKH |
| hrv-01 | TKSGYCGGVL YKIGQILGIH VGGNGRDGFS AMLLRSYFTD TQGQIKVNKH |
| x02316-02 | TKSGYCGGVL YKIGQVLGIH VGGNGRDGFS AMLLRSYFTD VQGQITLSKK |
| hrv-07 | TKAGFCGGVL YKVGSILGIH VGGNGRDGFS AMLLQSYFSE TQGLITKELP |
| dq473503-07 | TKAGFCGGVL YKVGSILGIH VGGNGRDGFS AMLLQSYFSE TQGLITKELP |
| hrv-08 | TKSGFCGGVL YKVGQVIGIH VGGNGRQGFS AMLLKRYFNQ QQGQIIIKKP |
| pico-09 | TKSGYCGGVL YKIGSIIGIH VGGNGRDGFS AMLLRSYFNE TQGQIINSRN |
| hrv-09 | TKSGYCGGVL YKIGSIIGIH VGGNGRDGFS AMLLRSYFNE TQGQIISSRN |
| hrv-09-f01 | TKSGYCGGVL YKIGSIIGIH VGGNGRDGFS AMLLRSYFNE TQGQIVSSRN |
| hrv-09-f02 | TKSGYCGGVL YKIGSIIGIH VGGNGRDGFS AMLLRSYFNE TQGQIVSSRN |
| dq473498-10 | TKSGYCGGIL YKIGQVLGIH VGGNGRDGFA AMLLRSYFSE TQGEIIISKS |
| hrv-10 | TKSGYCGGIL YKIGQVLGIH VGGNGRDGFA AMLLRSYFSE TQGEIIISKS |
| ef173414-11 | TKSGYCGGIL YKIGQILGIH VGGNGRDGFA AMLLRSYFSE AQGQITTSKS |
| ef173415-12 | TKSGYCGGVL YKIGQIVGIH VGGNGRDGFS AMLLRSYFTN FQGVITMQDD |
| hrv-13 | TKSGYCGGVL YKIGQIIGIH VGGNGRDGFS AMLLRSYFNQ TQGEITVTKK |
| hrv-13-f03 | TKSGYCGGVL YKIGQIIGIH VGGNGRDGFS AMLLRSYFNQ TQGEITVAKK |
| dq473493-15 | TKSGYCGGVL YKIGSVIGIH VGGNGRDGFS AMLLRSYFSE TQGQITLKKK |
| l24917-16 | TKSGYCGGVL YKIGQILGIH VGGNGRDGFS SMLLRSYFTE QQGQIQISKH |
| hrv-18 | TKSGYCGGIL YKIGQVLGIH VGGNGRDGFA AMLLRSYFSE TQGQIVSSKS |
| hrv-19 | TKSGYCGGVL YKIGVVLGIH VGGNGRDGFS SMLLRSYFSE TQGEITKTEN |
| hrv-20 | TKSGFCGGVL YKIGLVLGIH VGGNGRDGFS AMLLRSYFTE QQGKITSKTS |
| hrv-21 | TKSGYCGGIL YKIGQVLGIH VGGNGRDGFA AMLLRSYFSE TQGQIINSKP |
| hrv-22 | TKSGYCGGVL YKIGNILGIH VGGNGKDGFS ATLLRSYFSE TQGQITKTTS |
| dq473497-23 | TKSGYCGGVL YKIGQVLGIH VGGNGRDGFS AMLLRSYFAD TQGQITLSKR |
| hrv-24 | TKSGYCGGIL YKIGQVLGIH VGGNGRDGFA AMLLRSYFSE TQGQIVTRKS |
| ef173416-24 | TKSGYCGGIL YKIGQVLGIH VGGNGRDGFA AMLLRSYFSE TQGQIVTRKS |
| hrv-25 | TKSGYCGGIL YKIGQVLGIH VGGNGRDGFA AMLLRSYFSE TQGQIITSKS |
| dq473508-28 | TKSGFCGGVL YKIGLVLGIH VGGNGRDGFS AMLLRSYFTE HQGKIVSKAN |
| hrv-29 | TKSGYCGGIL YKIGQVLGIH VGGNGKDGFA AMLLRSYFSE TQGQIITSKS |
| dq473512-30 | TKSGYCGGVL YKIGQVLGIH VGGNGRDGFS AMLLRSYFAD TQGQITLSKR |
| hrv-30 | TKSGYCGGVL YKIGQVLGIH VGGNGRDGFS AMLLRSYFAD TQGQITLSKR |
| hrv-31 | TKSGYCGGIL YKIGQVLGIH VGGNGRDGFA AMLLRSYFSE TQGQIVVTKP |
| hrv-32 | TKSGYCGGVL YKIGSIIGIH VGGNGRDGFS AMLLRSYFSE TQGQITSSRN |
| hrv-33 | TKSGYCGGIL YKIGQVLGIH VGGNGRDGFA AMLLRSYFSE TQGQITISKP |
| hrv-34 | TKSGYCGGIL YKIGQVLGIH VGGNGRDGFA AMLLRSYFTE AQGQIITSKS |
| dq473501-34 | TKSGYCGGIL YKIGQVLGIH VGGNGRDGFA AMLLRSYFTE AQGQIITSKS |
| dq473505-36 | TKAGYCGGVL YKVGSILGIH VGGNGRDGFS AMLLKSYFGE TQGLITKELP |
| hrv-38 | TKSGYCGGIL YKIGQVLGIH VGGNGRDGFA AMLLRSYFTE VQGQITTTKS |
| dq473495-38 | TKSGYCGGIL YKIGQVLGIH VGGNGRDGFA AMLLRSYFTE VQGQITTTKS |
| ay751783-39 | TKSGYCGGIL YKIGQVLGIH VGGNGRDGFS AMLLRSYFTD TQGQITLSKK |
| hrv-40 | TKSGYCGGIL YKIGQVLGIH VGGNGRDGFA AMLLRSYFTE TQGQIITSKS |
| dq473491-41 | TKSGYCGGVL YKIGQIMGIH VGGNGRDGFS AMLLRSYFSE TQGEITTTRK |
| hrv-43 | TKSGYCGGVL YKIGNVLGIH VGGNGRDGFS AMLLRSYFNE TQGKIITEKS |
| dq473499-44 | TKSGYCGGIL YKIGQVLGIH VGGNGKDGFA AMLLRSYFSE TQGQIITSKS |
| hrv-45 | TKSGFCGGVL YKVGQVIGIH VGGNGRQGFS AMLLKRYFNQ QQGQIILKKP |
| dq473506-46 | TKSGFCGGVL YKIGLVLGIH VGGNGRDGFS AMLLRSYFNE QQGKIVSRAD |
| hrv-47 | TKSGYCGGIL YKIGQVLGIH VGGNGRDGFA AMLLRSYFSE TQGQITTTKP |
| dq473496-49 | TKSGYCGGVL YKIGQVLGIH VGGNGRDGFS AMLLRSYFTD VQGQIISSKK |
| hrv-49-f04 | TKSGYCGGVL YKIGQVLGIH VGGNGRDGFS AMLLRSYFTD VQGQIVSSKK |
| hrv-50 | TKSGYCGGIL YKIGQVLGIH VGGNGRDGFA AMLLRSYFSE TQGQIITSKS |
| hrv-51 | TKSGFCGGIL YKIGLILGIH VGGNGRNGFS AMLLRSYFNE QQGQIMTKAD |
| dq473507-53 | TKSGFCGGVL YKIGLILGIH VGGNGRDGFS AMLLRSYFNE QQGKIVSKAE |
| hrv-54 | TKSGYCGGIL YKIGQVLGIH VGGNGKDGFA AMLLRSYFTE AQGQIVTTKP |
| hrv-54-f05 | TKSGYCGGIL YKIGQVLGIH VGGNGRDGFA AMLLRSYFTE AQGQIVTTKS |
| dq473511-55 | TKSGYCGGIL YKIGQVLGIH VGGNGRDGFA AMLLRSYFSE TQGQITNSRP |
| hrv-56 | TKSGYCGGIL YKIGQVLGIH VGGNGRDGFA AMLLRSYFSE TQGKIVTSKS |
| hrv-57 | TKSGYCGGIL YKIGQVLGIH VGGNGRDGFA AMLLRSYFSE AQGQIISSKS |
| hrv-58 | TKAGYCGGVL YKVGSILGIH VGGNGRDGFS AMLLKSYFGE TQGLITKELP |
| dq473500-59 | TKSGYCGGIL YKIGQVLGIH VGGNGRDGFS AMLLRSYFSE TQGQIISPKP |
| hrv-60 | TKSGYCGGIL YKIGQVLGIH VGGNGRDGFA AMLLRSYFTE AQGQITTTKT |
| hrv-61 | TKSGYCGGVL YKIGQIIGIH VGGNGRDGFS AMLLRSYFSE TQGEIITSKK |
| hrv-62 | TKSGYCGGIL YKIGQVLGIH VGGNGRDGFA AMLLRSYFSE TQGQIITSRS |
| hrv-63 | TKSGYCGGIL YKIGQVLGIH VGGNGRDGFA AMLLRSYFSE TQGKVIVSKF |
| hrv-64 | TKSGYCGGVL YKIGSVLGIH VGGNGRDGFS ATLIRSYFSE AQGQITKRTN |
| ef173417-64 | TKSGYCGGVL YKIGSVLGIH VGGNGRDGFS ATLIRSYFSE AQGQITKRTN |
| hrv-65 | TKSGFCGGVL YKIGLVLGIH VGGNGRNGFS AMLLRSYFNE QQGQIMSRAD |
| hrv-66 | TKSGYCGGIL YKIGQIIGIH VGGNGRDGFS AMLLRSYFSE TQGQIVAKKS |
| hrv-67 | TKSGYCGGVL YKIGSVIGIH VGGNGRDGFS AMLLRSYFSE TQGQITSSRN |
| hrv-68 | TKSGFCGGVL YKIGLVLGIH VGGNGRDGFS AMLLRSYFTE QQGKIVSKVS |
| hrv-71 | TKSGFCGGVL YKIGLILGIH VGGNGRNGFS AMLLRSYFNE QQGKIVSTSD |
| dq473492-73 | TKSGYCGGVL YKIGQIIGIH VGGNGRDGFS AMLLRSYFNQ TQGEITVTKK |
| dq473494-74 | TKSGYCGGVL YKIGSVLGIH VGGNGRDGFS AMLLRSYFSE TQGQLTTTKK |
| dq473510-75 | TKSGYCGGVL YKIGNILGIH VGGNGRDGFS AMLLRSYFNE TQGKIVAAKD |
| dq473502-76 | TKSGYCGGIL YKIGQVLGIH VGGNGRDGFA AMLLRSYFSE TQGQITISKP |
| hrv-76 | TKSGYCGGIL YKIGQVLGIH VGGNGRDGFA AMLLRSYFSE TQGQITISKP |
| hrv-77 | TKSGYCGGIL YKIGQVLGIH VGGNGRDGFA AMLLRSYFTE AQGQIVTTKP |
| hrv-78 | TKSGFCGGVL YKVGHIIGIH VGGNGRDGFS AMILRSYFNE NQGLIKNKTD |
| ef173418-78 | TKSGFCGGVL YKIGHIIGIH VGGNGRDGFS AMILRSYFNE NQGLIKNKTD |
| hrv-80 | TKSGYCGGVL YKIGLIIGIH VGGNGKDGFS AMLLRSYFNN HQGQIVNKTT |
| hrv-81 | TKSGYCGGVL YKIGLILGIH VGGNGRDGFS SMLLRSYFTE QQGQIKISQH |
| hrv-81-f06 | TKSGYCGGVL YKIGLVLGIH VGGNGRDGFS SMLLRSYFTE QQGQIKISKH |
| hrv-81-f07 | TKSGYCGGVL YKIGLVLGIH VGGNGRDGFS SMLLRSYFTE QQGQIKISKH |
| hrv-82 | TKSGYCGGVL YKIGNILGIH VGGNGKDGFS ATLLRSYFSE TQGQITKTAN |
| dq473509-82 | TKSGYCGGVL YKIGNVLGIH VGGNGKDGFS ATLLRSYFSE TQGQITKTAN |
| hrv-85 | TKSGYCGGIL YKIGQVLGIH VGGNGRDGFA AMLLRSYFSE TQGQIISTKS |
| pico-85 | TKSGYCGGIL YKIGQVLGIH VGGNGRDGFA AMLLRSYFSE TQGQIISTKS |
| dq473504-88 | TKAGYCGGVL YKVGSILGIH VGGNGRDGFS AMLLKSYFNE TQGLITKELP |
| a10937-89 | TKAGYCGGVL YKVGSILGIH VGGNGRDGFS AMLLKSYFGE TQGLITKELP |
| hrv-89 | TKAGYCGGVL YKVGSILGIH VGGNGRDGFS AMLLKSYFGE TQGLITKELP |
| hrv-89-f08 | TKAGYCGGVL YKVGSILGIH VGGNGRDGFS AMLLKSYFGE TQGLITKELP |
| hrv-89-f09 | TKAGYCGGVL YKVGSILGIH VGGNGRDGFS AMLLKSYFGE TQGLITKELP |
| m16248-89 | TKAGYCGGVL YKVGSILGIH VGGNGRDGFS AMLLKSYFGE TQGLITKELP |
| hrv-90 | TKSGYCGGIL YKIGQVLGIH VGGNGRDGFA AMLLRSYFSE TQGQITSTKT |
| hrv-94 | TKSGYCGGVL YKIGNILGIH VGGNGKDGFS ATLIRSYFSE TQGQITKRTS |
| ef173419-94 | TKSGYCGGVL YKIGNILGIH VGGNGKDGFS ATLIRSYFSE TQGQITKRTS |
| hrv-95 | TKSGFCGGVL YKVGQVIGIH VGGNGRQGFS AMLLKRYFNQ QQGQIIIKKP |
| hrv-96 | TKSGYCGGVL YKIGQIIGIH VGGNGRDGFS AMLLRSYFSE TQGEIKTTKK |
| hrv-98 | TKSGYCGGIL YKIGQVLGIH VGGNGRDGFA AMLLRSYFTE TQGQIVTTKS |
| hrv-100 | TKSGYCGGIL YKIGQVLGIH VGGNGRDGFA AMLLRSYFSE TQGQIITTKT |
| ef186077-qpm | TKPGQCGGVI LNTGNIIGIH VGGNGRVGYC ASLTKSYFAS AQGEIVNKCK |
| ef077279-nat001 | TKPGQCGGVI LNTGNIVGIH VGGNGRVGYC ASLTKSYFAS AQGEIVNKCK |
| ny1078 | TKPGQCGGVI LNTGNIIGIH VGGNGRVGYC ASLTKSYFAT TQGEIVNKCK |
| ef582385-c024 | TQPGQCGAVL ANTGNIIGIH VGGNGRVGYA AALLRKYFAE EQGAIISKCN |
| ef077280-nat045 | TKPGQCGGVL GNTGHIVGIH VGGNGRVGYG AALLRKYFCE QQGTITSIVD |
| ef582387-c026 | TKPGQCGGVV LNTGNIVGIH VGGNGRVGYC ASLTKSYFAS AQGEIINKCK |
| ef582386-c025 | TQPGQCGAVI ANVGNIIAIH VGGNGRVGYG AALLRKYFAA TQGEITTRKS |
| dq473485-03 | TKTGQCGGVL CTTGKIFGIH VGGNGRRGFS AQLKKQYFVE KQGLIVSKQK |
| ef173422-03 | TKTGQCGGVL CTTGKIFGIH VGGNGRQGFS AQLKKQYFVE KQGLIVSKQK |
| dq473490-04 | TKTGQCGGVL CSTGKIYGIH VGGNGRQGFS AQLKKQYFVQ KQGEIVQRKN |
| hrv-05 | TKTGQCGGVL CSTGKIYGIH VGGNGKQGFS AQLKKQYFVQ KQGQIITKRN |
| dq473486-06 | TKTGQCGGVL CTTGKIFGIH VGGNGRQGFS AQLRKQYFIE KQGQIISRQK |
| l05355-14 | TKTGQCGGVL CATGKIFGIH VGGNGRQGFS AQLKKQYFVE KQGQVIARHK |
| k02121-14 | TKTGQCGGVL CATGKIFGIH VGGNGRQGFS AQLKKQYFVE KQGQVIARHK |
| ef173420-17 | TRTGQCGGVL CSTGKIYGIH VGGNGRQGFS AQLRKQYFVE KQGAIINKRN |
| hrv-26 | TKTGQCGGVL CSTGKIYGIH VGGNGRQGFS AQLKKQYFVQ KQGQIVSKRN |
| hrv-27 | TKTGQCGGVL CSTGKIYGIH VGGNGRQGFS AQLKKQYFVQ KQGEIISKKK |
| ef173421-27 | TKTGQCGGVL CSTGKIYGIH VGGNGRQGFS AQLKKQYFVQ KQGEIISKKK |
| dq473487-35 | TKTGQCGGVL CTTGKIFGIH VGGNGRQGFS AQLRRQYFVS KQGQIVARQK |
| hrv-35 | TKTGQCGGVL CTTGKIFGIH VGGNGRQGFS AQLRRQYFVS KQGQIVARQK |
| ef173423-37 | TKTGQCGGVL CTTGKIFGIH VGGNGRQGFS AQLRRQYFIE KQGQIVSRQK |
| hrv-42 | TRTGQCGGVL CSTGKIYGIH VGGNGKQGFS AQLKKQYFVQ KQGQIITKRN |
| dq473488-48 | TKTGQCGGVL CSTGKIYGIH VGGNGRQGFS AQLKKQYFVE KQGAITTKRN |
| hrv-52 | TRTGQCGGVL CSTGKIYGIH VGGNGRQGFS AQLKKQYFVE KQGAITTRKN |
| hrv-52-f10 | TRTGQCGGVL CSTGKIYGIH VGGNGRQGFS AQLKRQYFVE KQGAITTRKN |
| ef173424-52 | TRTGQCGGVL CSTGKIYGIH VGGNGRQGFS AQLKKQYFVE KQGAITTRKN |
| hrv-69 | TRTGQCGGVL CSTGKIYGIH VGGNGRQGFS AQLKKQYFVE KQGAITTKRN |
| dq473489-70 | TRTGQCGGVL CSTGKIYGIH VGGNGRQGFS AQLRKQYFVE KQGAIINKRN |
| hrv-72 | TKTGQCGGVL CATGKIFGIH VGGNGRQGFS AQLKRQYFVE KQGQVIARQK |
| hrv-79 | TRTGQCGGVL CTTGKIFGIH VGGNGRQGFS AQLRRQYFVS KQGQITSRQK |
| hrv-83 | TRTGQCGGVL CTTGKIFGIH VGGNGRQGFS AQLRKQYFVS KQGQITSRQK |
| hrv-84 | TKTGQCGGVL CSTGKIYGIH VGGNGRQGFS AQLRKQYFVQ QQGQIISRKH |
| hrv-86 | TKTGQCGGVL CSTGKIFGIH VGGNGRQGFS AQLRKQYFVE KQGEIVSKQK |
| hrv-91 | TRTGQCGGVL CSTGKIYGIH VGGNGRQGFS AQLKKQYFVE KQGAIINKRS |
| hrv-92 | TRTGQCGGVL CTTGKIFGIH VGGNGRQGFS AQLRKQYFVA KQGQVIARQK |
| ef173425-93 | TKTGQCGGVL CSTGKIYGIH VGGNGKQGFS AQLKKQYFVQ KQGEIISKRK |
| hrv-97 | TKTGQCGGVL CSTGKIYGIH VGGNGKQGFS AQLKKQYFVQ KQGEIISKRK |
| hrv-99 | TKTGQCGGVL CSTGKIYGIH VGGNGRQGFS AQLKKQYFVQ KQGEIVTKRN |
| | 1801 1850 |
| annotation | .HHHH..... .......... .......... .......... ....HHHHHH |
| af499637-cva13 | SKEMGYPIIN APSKTKLEPS AFHYVFEGVK EPAVLTKNDP RLKTDFEEAI |
| af546702-cva21 | SKEVGYPIIN APSKTKLEPS AFHYVFEGVK EPAVLTKNDP RLKTDFEEAI |
| v01149-pv1m | SKEVGYPIIN APSKTKLEPS AFHYVFEGVK EPAVLTKNDP RLKTDFEEAI |
| d00239-01 | ANECGLPTIH TPSKTKLQPS VFYDVFPGSK EPAVSRDNDP RLKVNFKEAL |
| pico-01 | ATECGLPTIH TPSKTKLQPS VFYDVFPGSK EPAVLTDNDP RLEVNFKEAL |
| hrv-01 | ATECGLPTIH TPSKTKLQPS VFYDVFPGSK EPAVLTDNDP RLEVNFKEAL |
| x02316-02 | TSECNLPSIH TPCKTKLQPS VFYDVFPGSK EPAVLSEKDA RLQVDFNEAL |
| hrv-07 | VSSKNLPSIH VSSKTRLQPS VFYDVFPGTK EPAVLSSNDP RLEVDFDSAL |
| dq473503-07 | VSSKNLPSIH VSSKTRLQPS VFYDVFPGTK EPAVLSSNDP RLEVDFDSAL |
| hrv-08 | VKEVDYPSIH TPTKTKLQPS IFHDVFPGVK EPAVLSEKDP RLQVDLNTSL |
| pico-09 | VKDLGYPTIH TPSKTKLHPS VFHDVFKGTK EPAVLSEKDP RLEVDFKTSL |
| hrv-09 | VKDLGYPTIH TPSKTKLHPS VFHDVFKGTK EPAVLTEKDP RLEVDFKTSL |
| hrv-09-f01 | VKDIGYPTIH TPSKTKLHPS VFHDVFKGTK EPAVLSERDP RLEVDFKTSL |
| hrv-09-f02 | VKDIGYPTIH TPSKTKLHPS VFHDVFKGTK EPAVLSERDP RLEVDFKTSL |
| dq473498-10 | TSECGLPSIH TPSKTKLQPS VFFDVFPGTK EPAVLSSNDP RLEVDFNKAL |
| hrv-10 | TSECGLPSIH TPSKTKLQPS VFFDVFPGTK EPAVLSSNDP RLEVDFNKAL |
| ef173414-11 | VTELGLPSIH TPSKTKLQPS IFHDVFPGSK EPAVLSDNDP RLKVNFKEAL |
| ef173415-12 | VRNLAMPPIH VPTKTKLQPS VFHDIFPGVK EPAVLSKSDS RLETDFETAL |
| hrv-13 | VTECGLPTIH TPSKTKLQPS VFFDVFEGSK EPAVLTDRDP RLTTDFNKAL |
| hrv-13-f03 | VAECGLPTIH TPSKTKLQPS VFFDVFEGSK EPAVLTDKDP RLTTDFNKAL |
| dq473493-15 | VQECGYPTIH NPNKTRLHPS VFFEVFKGNK EPAVLSEKDP RLSVDFKTAL |
| l24917-16 | VKDVGLPSIH TPTKTKLQPS VFYDIFPGSK EPAVLTEKDP RLKVDFDSAL |
| hrv-18 | TAECNYPSIH TPSKTKLQPS VFYDIFPGNK EPAVLSEQDP RLKVDFKEAL |
| hrv-19 | VRERDLPTIH TPSKTKLQPS AFFDVFEGTK EPAVLSDRDP RLQTDFKTAL |
| hrv-20 | VKECNLYSIH TPSNTKLQPS VFYDVFPGSK EPAVLSGKDP RLEVDLDESI |
| hrv-21 | TDKCGLPSIH TPSKTKLQPS VFYDIFPGNK EPAVLSNKDP RLEVDFEKAL |
| hrv-22 | VRECGLPTIH TPSKTKLQPS VFYEVFEGTK EPAVLTDKDP RLETDFKTAL |
| dq473497-23 | TSECNLPSIH NPCKTKLQPS VFYDVFPGSK EPAVLSDKDT RLQVDFNESL |
| hrv-24 | TLDCNLPSIH TPSKTKLQPS VFYDVFPGNK EPAVLSEHDP RLEVNFKEAL |
| ef173416-24 | TLDCNLPSIH TPSKTKLQPS VFYDVFPGNK EPAVLSEHDP RLEVNFKEAL |
| hrv-25 | TSECGLPSIH TPNKTKLQPS VFYDVFPGSK EPAVLTSNDP RLEVDFKEAL |
| dq473508-28 | VKECNLYSIH TPSNTKLQPS VFHDIFPGSK EPAVLSSKDP RLEVNLDESI |
| hrv-29 | TSECGLPSIH TPSKTKLQPS VFYDVFPGNK EPAVLSSNDP RLKVDFKEAL |
| dq473512-30 | TSECNLPSIH NPCKTKLQPS VFYDVFPGSK EPAVLSEKDT RLQVDFNEAL |
| hrv-30 | TSECNLPSIH NPCKTKLQPS VFYDVFPGSK EPAVLSEKDT RLQVDFNEAL |
| hrv-31 | TIECNLPSIH TPSKTKLQPS VFYDVFPGSK EPAVLSEHDS RLEVDFKQAL |
| hrv-32 | VKDLGYPTIH TPNKTKLHPS VFYDVFKGTK EPAVLSEKDP RLETDFKTAL |
| hrv-33 | VVELGLPSIH TPSKTKLQPS VFHDVFPGSK EPAVLSDNDP RLEVDFKQAL |
| hrv-34 | TAECNLPSIH TPSKTKLQPS VFYDVFPGNK EPAVLSDHDP RLKVNFSEAL |
| dq473501-34 | TAECNLPSIH TPSKTKLQPS VFYDVFPGNK EPAVLSDHDP RLKVNFSEAL |
| dq473505-36 | VSARNLPSIH VSSKTRLQPS VFHDVFPGTK EPAVLSNNDP RLETDFDTAL |
| hrv-38 | TSECNLPSIH TPSKTKLQPS VFHDVFPGSK EPAVLSEHDP RLKVNFKEAI |
| dq473495-38 | TSECNLPSIH TPSKTKLQPS VFHDVFPGSK EPAVLSEHDP RLKVNFKEAI |
| ay751783-39 | TSECGLPSIH NPSKTKLQPS VFYDIFPGSK QPAVLSEKDT RLQVDFNEAL |
| hrv-40 | TIECNLPSIH TPSKTKLQPS VFYDVFPGNK EPAVLSEHDP RLKVDFKEAL |
| dq473491-41 | VSELNLPTIH TPAKTKLQPS VFFDVFEGTK EPAVLTERDP RLTTDFNTAL |
| hrv-43 | VREYGFPTIH TPSKTKLQPS VFFDVFEGSK EPAVLSDKDP RLETDFKTAL |
| dq473499-44 | TSECGVPSIH TPSKTKLQPS VFYDVFPGNK EPAVLSSNDP RLKVDFKEAL |
| hrv-45 | VKEVDYPSIH TPTKTKLQPS VFHDIFPGVK EPAVLTEKDP RLEVDLNSSL |
| dq473506-46 | VKEYNMYSIH TPTKTKLQPS VFHDVFPGSK EPAVLSTKDP RLEVDLDSSI |
| hrv-47 | TIECNLPSIH TPSKTKLQPS VFYDVFPGSK EPAVLSEYDP RLEVDFKQAL |
| dq473496-49 | TSECNLPSIH NPSKTKLQPS VFYDVFPGSK EPAVLSEKDT RLQVDFNEAL |
| hrv-49-f04 | TSECNLPSIH SPSKTKLQPS VFYDVFPGSK EPAVLSEKDA RLQVDFNEAL |
| hrv-50 | TIECNLPSIH TPSKTKLQPS VFYDVFPGNK EPAVLSNHDP RLKVDFNEAL |
| hrv-51 | VKEKNLYSIH TPTKTKLQPS IFHDVFPGKK EPAVLSSKDP RLQVDLEEAI |
| dq473507-53 | VKEHNLYSIH TPTKTKLQPS VFHDVFPGSK EPAVLSTRDP RLEVDLDSSI |
| hrv-54 | TIECNLPSIH TPSKTKLQPS VFYDVFPGSK EPAVLSEHDP RLEVDFKQAL |
| hrv-54-f05 | TIECNLPSIH TPSKTKLQPS VFYDVFPGSK EPAVLSEHDP RLEVDFKQAL |
| dq473511-55 | TSECGLPSIH TPSKTKLQPS VFYDVFPGNK EPAVLSNHDP RLEVDFEKAI |
| hrv-56 | TSECGLPSIH TPSKTKLQPS VFFDVFPGTK EPAVLTNSDH RLEVDFNQAL |
| hrv-57 | TDKCGLPSIH TPSKTKLQPS VFYDVFPGSK EPAVLSSNDP RLEVDFEKAL |
| hrv-58 | VSVKNLPSIH VSSKTRLQPS VFHDVFPGTK EPAVLSNNDP RLETDFDTAL |
| dq473500-59 | TSLCGLPSIH TPSKTKLQPS VFHDIFPGSK EPAVLSSKDP RLEVDFDEAL |
| hrv-60 | TAECNLPSIH TPSKTKLQPS VFYNVFPGNK EPAVLSEHDP RLKTNFKEAL |
| hrv-61 | VHECGYPTIH TPAKTKLQPS VFFDVFEGSK EPAVLTEKDP RLTTDFNQAL |
| hrv-62 | TSECGLPSIH TPNKTKLQPS VFYDVFPGSK EPAVLTSNDP RLEVDFKEAL |
| hrv-63 | AKECGLPSIH TPSKTKLQPS VFYDVFPGTK EPAVLSSNDP RLEVDFNEAL |
| hrv-64 | VNECGLPTIH TPSKTKLQPS VFYDVFEGTK EPAVLTDKDP RLETDFKTAL |
| ef173417-64 | VNECGLPTIH TPSKTKLQPS VFYDVFEGTK EPAVLTDKDP RLETDFKTAL |
| hrv-65 | VREKNLFSIH TPTKTKLQPS VFHDTFPGKK EPAVLSSKDP RLQVDLEESI |
| hrv-66 | TIECNLPSIH TPSKTKLQPS IFYDVFPGNK EPAVLSDHDP RLEVDFKEAL |
| hrv-67 | VKDLGYPTIH TPNKTKLQPS VFHDVFKGTK EPAVLSDKDP RLETDFRTSL |
| hrv-68 | VKECNLYSIH TPSNTKLQPS VFYDVFPGSK EPAVLSGKDP RLEVNLDESI |
| hrv-71 | VKDKNLYSIH TPTNTKLQPS VFHDTFPGKK EPAVLSPKDP RLQVNLEEAI |
| dq473492-73 | VAECGLPTIH TPSKTKLQPS VFFDVFEGSK EPAVLTDKDP RLTTDFNKAL |
| dq473494-74 | VQDCGYPTIH NPTKTKLLPS VFFDVFKGSK EPAVLSEKDP RLETDFRTAL |
| dq473510-75 | VRNIGYPTIH TPSKTKLQPS VFFDVFEGTK EPAVLSESDP RLKTDFKTAL |
| dq473502-76 | TVELGLPSIH TPSKTKLQPS VFHDVFPGSK EPAVLSDNDP RLEVDFKQAL |
| hrv-76 | TVELGLPSIH TPSKTKLQPS VFHDVFPGSK EPAVLSDNDP RLEVDFKQAL |
| hrv-77 | TTECNLPSIH TPSKTKLQPS IFYDIFPGNK EPAVLSENDP RLEVNFKEAL |
| hrv-78 | VSVAGFNPVH VPSKTKLQPS IFFDVFPGDK EPAVLSKHDP RLETDFHTAL |
| ef173418-78 | VSVAGFNPVH VPSKTKLQPS IFFDVFPGDK EPAVLSKHDP RLETDFHTAL |
| hrv-80 | TKEKGIYSIH TPTKTKLQPS VFHDVFPGTK EPAVLSPYDN RLNVDLEDSI |
| hrv-81 | VKDVGLPSIH TPSKTKLQPS VFYDVFPGSK EPAVLTDKDP RLKVDFETAL |
| hrv-81-f06 | VKDVGLPSIH TPSKTKLQPS VFYDIFPGSK EPAVLTDKDP RLKVDFETAL |
| hrv-81-f07 | VKDVGLPSIH TPSKTKLQPS VFYDIFPGSK EPAVLTDKDP RLKVDFETAL |
| hrv-82 | VREYGLPTIH TPSKTKLQPS VFHDVFKGTK EPAVLSEKDP RLETDFKKAL |
| dq473509-82 | VKEHGFPTIH TPSKTKLQPS VFYDVFKGTK EPAVLSEKDP RLETDFKKAL |
| hrv-85 | TTECNYPSVH TPSKTKLQPS VFYDVFPGNK EPAVLSEHDP RLKVDFKEAL |
| pico-85 | TTECNYPSVH TPSKTKLQPS VFYDVFPGNK EPAVLSEHDP RLKVDFKEAL |
| dq473504-88 | VSAKNLPSIH VSSKTRLQPS VFHDVFPGTK EPAVLSDRDP RLEVDFNSAL |
| a10937-89 | VSVKNLPSVH VSSKTRLQPS VFHDVFPGTK EPAVLSSNDP RLETDFDSAL |
| hrv-89 | VSVKNLPSIH VSSKTRLQPS VFHDVFPGTK EPAVLSSNDP RLETDFDSAL |
| hrv-89-f08 | VSVKNLPSIH VSSKTRLQPS VFHDVFPGTK EPAVLSSNDP RLETDFDSAL |
| hrv-89-f09 | VSVKNLPSIH VSSKTRLQPS VFHDVFPGTK EPAVLSSNDP RLETDFDSAL |
| m16248-89 | VSVKNLPSVH VSSKTRLQPS VFHDVFPGTK EPAVLSSNDP RLETDFDSAL |
| hrv-90 | THECALPSIH TPSKTKLQPS VFYDVFPGSK EPAVLSDHDP RLEVDFKEAL |
| hrv-94 | TKEYGLPTIH TPSKTKLQPS VFYDVFEGTK EPAVLTDKDP RLETDFKTAL |
| ef173419-94 | TKEYGLPTIH TPSKTKLQPS VFYDVFEGTK EPAVLTDKDP RLETDFKTAL |
| hrv-95 | VKEVDYPSIH TPTKTKLQPS IFHDVFPGVK EPAVLSEKDP RLQVDLNTSL |
| hrv-96 | VNECGYPTIH TPAKTKLQPS VFFDVFEGSK EPAVLSEKDP RLKTDFNQAL |
| hrv-98 | TIECNLPSIH TPSKTKLQPS VFYDVFPGSK EPAVLSEHDP RLEVDFKQAL |
| hrv-100 | TLECNLPSIH TPSKTKLQPS VFYDVFPGSK EPAVLSSSDP RLEVDFKEAL |
| ef186077-qpm | VQDVGLKPIN TPEHSKLHPS VFYDIFPGEK EPAVLTQRDP RLETDLKTAV |
| ef077279-nat001 | VQDVGLKPIN TPEHSKLYPS VFYDIFPGEK EPAVLTQKDP RLETDLKTAV |
| ny1078 | VQDVGLKPIN TPEHSKLYPS VFFHVFPGEK EPAALTQKDP RLETDLKTAV |
| ef582385-c024 | VKEKNWKPVN TPSQTKLHPS VFHDVFPGVK EPAALHPKDP RLEVDLTTAV |
| ef077280-nat045 | VRELGYSPIN TPAKTKLLPS VFYDIFPGIK EPAPLSNRDS RLESNLDDTV |
| ef582387-c026 | VQDVGLKPIN TPEHSKLHPS VFYDIFPGEK EPAVLTQKDP RLETDLKTAV |
| ef582386-c025 | VRDVGMSPIN TPCKTKLYPS VFYDIFPGKK EPAALSDKDP RLEVNLKEAV |
| dq473485-03 | VRDIGLNPIN TPTKTKLHPS VFYNVFPGSK QPAVLNDNDP RLEVKLAESL |
| ef173422-03 | VRDIGLNPIN TPTKTKLHPS VFYNVFPGSK QPAVLNDNDP RLEVKLAESL |
| dq473490-04 | VRELDIKPIN TPSKTKLHPS VFYNVFPGTK EPAVLHPSDS RLEVDFEESL |
| hrv-05 | VRELDIKPIN TPSKTKLHPS VFYNVFPGSK EPAVLHPADE RLEVNFEESL |
| dq473486-06 | VRELNMASIN TPTKSKLHPS VFYNVFPGSK EPAVLSDNDP RLEVKLSDSL |
| l05355-14 | VREFNINPVN TPTKSKLHPS VFYDVFPGDK EPAVLSDNDP RLEVKLTESL |
| k02121-14 | VREFNINPVN TATKSKLHPS VFYDVFPGDK EPAVLSDNDP RLEVKLTESL |
| ef173420-17 | VKELGLKPIN TPTKTKLHPS VFYETFPGTK EPAALNDSDP RLEVNLRDSL |
| hrv-26 | VRELNIKPIN TPNTTKLHPS VFYNVFPGSK EPAVLHPADQ RLEVNFEDSL |
| hrv-27 | VHDLGLKPIN TPSKTKLLPS VFYNVFPGTK EPAVLHPADE RLEVDFEESL |
| ef173421-27 | VHDLGLKPIN TPSKTKLLPS VFYNVFPGTK EPAVLHPADE RLEVDFEESL |
| dq473487-35 | LKDLNLMPVN TPTKTKIHPS VFYDVFPGSK EPAVLSDNDP RLEVKLSESL |
| hrv-35 | LKDLNLMPVN TPTKTKIHPS VFYDVFPGSK EPAVLSDNDP RLEVKLSESL |
| ef173423-37 | VRELNIAPVN TPNKTKLHPS VFYNVFPGSK EPAVLSDNDP RLEVKLSDSL |
| hrv-42 | VRELSIKPIN TPNTTKLHPS VFYNVFPGSK EPAVLHPADE RLEVNFEESL |
| dq473488-48 | VREVGLKPIN TPTKTKLHPS VFYEIFPGSK EPAVLDDHDP RLEVNLHDSL |
| hrv-52 | VREVGLKPIN TPTKTKLHPS VFHEIFPGSK EPAVLNDTDP RLEVNLCDSL |
| hrv-52-f10 | VREMGLKPIN TPTKTKLHPS VFYEVFPGSK EPAVLNDADP RLEVNLRDSL |
| ef173424-52 | VREVGLKPIN TPTKTKLHPS VFHEIFPGSK EPAVLNDTDP RLEVNLCDSL |
| hrv-69 | VREVGLKPIN TPTKTKLHPS VFYEVFPGSK EPAVLDDSDP RLEVNLRDSL |
| dq473489-70 | VKELGLKPIN TPTKTKLHPS VFYEIFPGSK EPAALNDSDP RLEVNLRDSL |
| hrv-72 | VRELNMNPIN TPTKSKLHPS VFYNVFPGDK EPAVLSDNDP RLEVKLTESL |
| hrv-79 | LKDLNLNPIN TPSKTKLHPS VFYDIFPGNK QPAVLSDNDP RLEVKLADSL |
| hrv-83 | LKDLNLNPVN TPTKTKLHPS VFHDVFPGSK QPAVLSDNDP RLEVKLTESL |
| hrv-84 | VDDLNIKPIN TPTKTKLLPS VFYNVFPGSK EPAVLHPADK RLEVDLNDSL |
| hrv-86 | VKELGLHPIN TPSKTKLHPS VFYNVFEGNK QPAVLKDNDP RLEVNFSESL |
| hrv-91 | VRELGLKPIN TPTKTKLHPS VFYDVFPGSK EPAALNGSDP RLEVNLRDSL |
| hrv-92 | LRELNLAPVN TPTKTKLHPS VFYDVFPGNK QPAVLSDNDP RLEVKLTESL |
| ef173425-93 | VQELGMKPIN TPNKTKLLPS VFYNVFPGTK EPAVLHPADE RLEVNFEESL |
| hrv-97 | VHDLGLKPIN TPSKTKLLPS VFYNVFPGTK EPAVLHPSDE RLEVDFEESL |
| hrv-99 | VRELNLKPIN TPSKTKLHPS VFFNVFPGSK EPAVLHPSDE RLEVIFEDSL |
| | 1851 1900 |
| annotation | HH........ ..HHHHHHHH HHHHHHHHH. .......HHH HHHHH..... |
| af499637-cva13 | FSKYVGNKIT EVDEYMKEAV DHYAGQLMSL DINTEQMCLE DAMYGTDGLE |
| af546702-cva21 | FSKYVGNKIT EVDEYMKEAV DHYAGQLMSL DINTEQMCLE DAMYGTDGLE |
| v01149-pv1m | FSKYVGNKIT EVDEYMKEAV DHYAGQLMSL DINTEQMCLE DAMYGTDGLE |
| d00239-01 | FSKYKGNTEC SLNQHMEIAI AHYSAQLITL DIDSKPIALE DSVFGIEGLE |
| pico-01 | FSKYKGNVEC NLNEHMEIAI AHYSAQLMTL DIDSRPIALE DSVFGIEGLE |
| hrv-01 | FSKYKGNVEC NLNEHMEIAI AHYSAQLMTL DIDSRPIALE DSVFGIEGLE |
| x02316-02 | FSKYKGNTDC SINDHIRIAS SHYAAQLITL DIDPKPITLE DSVFGTDGLE |
| hrv-07 | FSKYKGNVNC QLTPHMEIAV AHYAAQLSTL DINPQPLSLE ESVFGIDGLE |
| dq473503-07 | FSKYKGNVNC QLTPHMEIAV AHYAAQLSTL DINPQPLSLE ESVFGIDGLE |
| hrv-08 | FSKYAGNKQM EVNEYMKVAA SHYASQLETL DIPNQQMSIE DCVYGTDNLE |
| pico-09 | FSKYKGNVDC TLNEHMRVAI AHYSAQLMTL DINPDNITME ESVFGTDGLE |
| hrv-09 | FSKYKGNVDC TLNEHMRVAI AHYSAQLMTL DINPDNITME ESVFGTDGLE |
| hrv-09-f01 | FSKYKGNVDC TLNEHMRVAI AHYSAQLMTL DINPNNITME ESVFGTDGLE |
| hrv-09-f02 | FSKYKGNVDC TLNEHMRVAI AHYSAQLMTL DINPNNITME ESVFGTDGLE |
| dq473498-10 | FSKYKGNNEC VINDHVKVAV SHYSAQLMTL DINPEPISLE DSVFGTEGLE |
| hrv-10 | FSKYKGNNEC VINDHVKVAV SHYSAQLMTL DINPEPISLE DSVFGTEGLE |
| ef173414-11 | FSKYKGNNDC VMNDHIKVAV SHYSAQLLTL DIDSKPITVE DSVFGIDGLE |
| ef173415-12 | FSKYKGNVHM DLTPHMEVAI SHYTAQLSSL DIPNTELSLE ECVYGAEGLE |
| hrv-13 | FSKYKGNIEC SMTDHMRVAV SHYSAQLMTL DIDSVNISLE ESVFGTEGLE |
| hrv-13-f03 | FSKYKGNIEC SMTDHMRVAI SHYSAQLMTL DIDSVNISLE ESVFGTEGLE |
| dq473493-15 | FSKYKGNNTC ELNDHIKVAV AHYSAQLATL DIGPASMSLE DSVFGTDGLE |
| l24917-16 | FSKYKGNTEC SLNEHIQVAV AHYSAQLATL DIDPQPIAME DSVFGMDGLE |
| hrv-18 | FSKYKGNNPC EINEHIKVAV SHYSAQLMTL DIDPSPISLE DGVFGMEGLE |
| hrv-19 | FSKYKGNKKF EMNDHIRVAV SHYSAQLMTL DIDHSNMSLE DSVFGIEGLE |
| hrv-20 | FSKYKGNEPV EITQNMLTAT AHYTAQLSTL DINPKPLSLE ESVYGIEGLE |
| hrv-21 | FSKYKGNEHC VMNDHINVAI SHYSAQLATL DINPQPISIE ESVFGMDGLE |
| hrv-22 | FSKYKGNLPC EMNDHVKVAV AHYSAQLMTL EIDSRNMSLE DSVFGTEGLE |
| dq473497-23 | FSKYKGNTHC VMNEHIKIAS AHYAAQLITL DIDPNPITLE DSVFGTDGLE |
| hrv-24 | FSKYKGNSQC ELNDHIKVAI SHYSAQLTTL DICPDPISLE DSVFGVEGLE |
| ef173416-24 | FSKYKGNSQC ELNDHIKVAI SHYSAQLTTL DICPDPISLE DSVFGVEGLE |
| hrv-25 | FSKYKGNNQC TMNDHIKVAI SHYSAQLMTL DIDPKPISLE ESVFGIEGLE |
| dq473508-28 | FSKYKGNEPV EITQNMLTAA AHYTAQLSTL DIDSTPLSLE ESVYGIEGLE |
| hrv-29 | FSKYKGNNQC TMNDHIRVAI SHYSAQLMTL DIDPKPISLE ESVFGIEGLE |
| dq473512-30 | FSKYKGNTHC TMNDHMKIAS SHYAAQLITL DINPSPITLE DSVFGTDGLE |
| hrv-30 | FSKYKGNTHC TMNDHMKIAS SHYAAQLITL DINPSPITLE DSVFGTDGLE |
| hrv-31 | FSKYKGNSQC EINDHVKVAI SHYSAQLMTL DIDPNPISLE DSVFGAEGLE |
| hrv-32 | FSKYKGNVNC ELNDHMRVAI AHYSAQLMTL DIDPSNMTME ESVFGTDGLE |
| hrv-33 | FSKYKGNNEC AMNEHIKVAV SHYSAQLHTL DVDPRPITVE DSVFGVEGLE |
| hrv-34 | FSKYKGNNQC TINDHIKVAI SHYSAQLTTL DIDPNPITLE ESVFGIEGLE |
| dq473501-34 | FSKYKGNNQC TINDHIKVAI SHYSAQLTTL DIDPNPITLE ESVFGIEGLE |
| dq473505-36 | FSKYKGNPAC EVTTHMKIAV AHYAAQLSTL DINPQPLSLE ESVFGIEGLE |
| hrv-38 | FSKYKGNNQC EMNDHIRVAI SHYSAQLATL DIDPNPISLE DSVFGIEGLE |
| dq473495-38 | FSKYKGNNQC EMNDHIRVAI SHYSAQLATL DIDPNPISLE DSVFGIEGLE |
| ay751783-39 | FSKYKGNVDC PMNDHIKIAS SHYAAQLITL DINPNPITLE DGVFGTEGLE |
| hrv-40 | FSKYKGNNPC EVNDHIKVAI SHYSAQLMTL DIDSNPISLE DSVFGIEGLE |
| dq473491-41 | FSKYKGNVKC EMSEHMKVAI SHYSAQLMTL DIDPTKISLE ESVFGTEGLE |
| hrv-43 | FSKYKGNKEC EMNDHIKVAV AHYSAQLMTL DIDHSNMSLG DSVFGIEGLE |
| dq473499-44 | FSKYKGNNQC IMNDHIKVAI SHYSAQLMTL DIDPKPISLE ESVFGIEGLE |
| hrv-45 | FSKYAGNVNL EMNEYMIVAA SHYASQLETL DISNQQMSIE ECVYGTDNLE |
| dq473506-46 | FSKYKGNEAI KITDNMLVAA AHYTAQLSTL DIDPQPISLE DSVYGIEGLE |
| hrv-47 | FSKYKGNNQC EINDHVRVAI SHYSAQLMTL DIDSNPISLE DSVFGTEGLE |
| dq473496-49 | FSKYKGNTNC FMNDHIRIAS SHYAAQLITL DIDPSPITLE DSVFGTDGLE |
| hrv-49-f04 | FSKYKGNTNC SMNDHIRIAS SHYAAQLITL DIDPSPITLE DSVFGTDGLE |
| hrv-50 | FSKYKGNNHC TMNDHIKVAI SHYSAQLATL DINPSPISIE DSVFGIEGLE |
| hrv-51 | FSKYKGNKEI KITQNMEVAA AHYAAQLSTL NINPEPLTME ESVYGIEGLE |
| dq473507-53 | FSKYKGNEAV KISENMLVAA AHYTAQLTTL DIDPQPISLE DSVYGIEGLE |
| hrv-54 | FSKYKGNNQC EMNEHIKVAA SHYSAQLMTL DIDSNPISLE DSVFGTEGLE |
| hrv-54-f05 | FSKYKGNNQC EINEHIKVAA SHYSAQLMTL DIDSNPISLE DSVFGTEGLE |
| dq473511-55 | FSKYKGNEQC VINDHIKVAV SHYSAQLATL DINPQPVSIE ESVFGMEGLE |
| hrv-56 | FSKYKGNNQC VMNDHVKVAI SHYSAQLMTL DINPEPISLE DSVFGTEGLE |
| hrv-57 | FSKYKGNEHC VMNDHINVAV SHYSAQLATL DINPQPISIE ESVFGIEGLE |
| hrv-58 | FSKYKGNPTC EVTPHMKIAV AHYAAQLSTL DISTQPLSLE ESVFGIDGLE |
| dq473500-59 | FSKYKGNVDC PMNDHIRVSV AHYSAQLATL DIDPNPVSME EGVFGMEGLE |
| hrv-60 | FSKYKGNNQC EINDHIRVAI SHYSAQLATL DIDPSPISLE DSVFGIEGLE |
| hrv-61 | FSKYKGNVEC NMSEHMKVAI SHYSAQLMTL DIDPSNITLE ESVFGTEGLE |
| hrv-62 | FSKYKGNNQC TINDHIKVAI SHYSAQLMTL DIDSKPISLE ESVFGIEGLE |
| hrv-63 | FSKYKGNNEC AINNHVKVAI SHYSAQLMTL DINPEPISLE DSVFGIEGLE |
| hrv-64 | FSKYKGNLPC EMNDHVKVAV AHYSAQLMTL EIDSRNMSLE DSVFGADGLE |
| ef173417-64 | FSKYKGNLPC EMNDHVKVAV AHYSAQLMTL EIDSRNMSLE DSVFGADGLE |
| hrv-65 | FSKYKGNKQI EITQNMRVAA AHYTAQLSTL DISPEPLSME ESVYGIEGLE |
| hrv-66 | FSKYKGNNKC ELNDHIKVAT SHYAAQLATL DIDSNPITLE DSVFGVEGLE |
| hrv-67 | FSKYKGNVEC ELNDHMKVAI AHYSAQLMTL DINPSNITIE DSVFGTDGLE |
| hrv-68 | FSKYKGNELV EITQNMLTAA AHYTAQLSTL DIDPTPLSLE ESVYGIEGLE |
| hrv-71 | FSKYKGNEKI EITQNMKIAA AHYAAQLSTL DINSEPLTLE ESVYGIEGLE |
| dq473492-73 | FSKYKGNIEC SMTDHMRVAI SHYSAQLMTL DIDSTNMSLE ESVFGTEGLE |
| dq473494-74 | FSKYKGNNTC QMNDHIRVAV AHYSAQLATL DINPANITLE DSVFGIEGLE |
| dq473510-75 | FSKYKGNPEC EMNDHIKVAI AHYSAQLMTL DIQTSSVSLE ESVFGIDGLE |
| dq473502-76 | FSKYKGNNEC TMNEHIKVAV SHYSAQLHTL DIDPKSITVE DSVFGIEGLE |
| hrv-76 | FSKYKGNNEC TMNEHIKVAV SHYSAQLHTL DIDPKSITVE DSVFGIEGLE |
| hrv-77 | FSKYKGNNPC EXNDHIKVAV SHYSAQLMTL DIDSNPISLE SSVFGIEGLE |
| hrv-78 | FSKYSGNQQI EMSDNIKVAV AHYSAQLSTL DINPAPLSLE ECVFGIDGLE |
| ef173418-78 | FSKYSGNQQI EMSDNIKVAV AHYSAQLSTL DINPAPLSLE ECVFGIDGLE |
| hrv-80 | FSKYKGNTSL EVTHNMKVAA THYAAQLMTL DIDPKPLTLE ESVYGIEGLE |
| hrv-81 | FSKYKGNVKC DLNDHMQVAV AHYSAQLATL DIDPQPIALE DSVFGMDGLE |
| hrv-81-f06 | FSKYKGNVEC ELNDHIQVAV AHYSAQLATL DIDPQPVTLE DSVFGMDGLE |
| hrv-81-f07 | FSKYKGNVEC ELNDHIQVAV AHYSAQLATL DIDPQPVTLE DSVFGMDGLE |
| hrv-82 | FSKYKGNLDC EMNDHVKVAV AHYSAQLMTL DIDSSNMSLE DSVFGSEGLE |
| dq473509-82 | FSKYKGNLNC EINDHVKIAV AHYSAQLMTL DIDSNNMSLE DSVFGSDGLE |
| hrv-85 | FSKYKGNGPC EMNDHIKVAI SHYSAQLMTL DIDSNPISLE DSVFGMEGLE |
| pico-85 | FSKYKGNGPC EMNDHIKVAI SHYSAQLMTL DIDSNPISLE DSVFGMEGLE |
| dq473504-88 | FSKYKGNADC PLTSHMKVAV AHYAAQLSTL DINPQPLSLE ESVFGIEGLE |
| a10937-89 | FSKYKGNPAC QVTPHMKIAV AHYAAQLSTL DINPQPLSLE ESVFGIEGLE |
| hrv-89 | FSKYKGNPAC QVTPHMKIAV AHYAAQLSTL DINPQPLSLE ESVFGIEGLE |
| hrv-89-f08 | FSKYKGNPAC QVTPHMKIAV AHYAAQLSTL DINPQPLSLE ESVFGIEGLE |
| hrv-89-f09 | FSKYKGNPAC QVTPHMKIAV AHYAAQLSTL DINPQPLSLE ESVFGIEGLE |
| m16248-89 | FSKYKGNPAC QVTPHMKIAV AHYAAQLSTL DINPQPLSLE ESVFGIEGLE |
| hrv-90 | FSKYKGNNQC VMNDHIKVAI SHYSAQLMTL DIDPKPISIE DSVFGIEGLE |
| hrv-94 | FSKYKGNLPC EMNDHVKIAV AHYSAQLMTL DIDPRNMTLE DSVFGADGLE |
| ef173419-94 | FSKYKGNLPC EMNDHVKIAV AHYSAQLMTL DIDPRNMTLE DSVFGADGLE |
| hrv-95 | FSKYAGNKQM EVNEYMKVAA SHYASQLETL DIPNQQMSIE DCVYGTDNLE |
| hrv-96 | FSKYKGNVNC DMSEHMKVAV SHYSAQLMTL DIDPSNITLE ESVFGTEGLE |
| hrv-98 | FSKYKGNNQC EMNEHIKVAV SHYSAQLMTL DIDSNPISLE DSVFGTEGLE |
| hrv-100 | FSKYKGNEHC VLNDHIRVAV SHYSAQLITL DIDPKPISLE DSVFGIEGLE |
| ef186077-qpm | MSKYKGNVKI EMSENIQIAV EHYSAQLFML DINPEPISLE QAVYGMENLE |
| ef077279-nat001 | LSKYKGNVQI EMNENIQIAV EHYSAQLFML DINPEPISLE QAVYSMQNLE |
| ny1078 | MSKYKGNVHI EMSENIHIAV EHYSAQLFML DINPEPITLE QAVYGMQNLE |
| ef582385-c024 | MSKYKGNIDV PMNEYIETAV DHYAAQLYML DINPEPITME QAIYGYANLE |
| ef077280-nat045 | FSKYKGNAQV EFNEFMQVAV DHYSAQLYTL DINPAPLTLE QAAYGIPNLE |
| ef582387-c026 | LSKYRGNVEI EMSENMQIAV EHYSAQLFML DINPEPISLE QAVYGMENLE |
| ef582386-c025 | MSKYKGNKGC QMNDYVLTAA KHYAAQLFPL DINPEPITME QAVYGTDYLE |
| dq473485-03 | FSKYKGNVQM EPTENMLIAV DHYAGQLMSL DISTKELTLK EALYGVDGLE |
| ef173422-03 | FSKYKGNVQM EPTENMLIAV DHYAGQLMSL DISTKELTLK EALYGVDGLE |
| dq473490-04 | FSKYKGNAKM EITDNMRVAI DHYSGQLLSL DIPTQELTLK EALYGTDGLE |
| hrv-05 | FSKYKGNIES EITENMKVAI DHYAGQLLSL DIPTQELTLK EALYGTDGLE |
| dq473486-06 | FSKYKGNIEM KPTENMLIAV DHYAGQLMSL DIPTEELTLK EALYGVDGLE |
| l05355-14 | FSKYKGNVNT EPTENMLVAV DHYAGQLLSL DIPTSELTLK EALYGVDGLE |
| k02121-14 | FSKYKGNVNT EPTENMLVAV DHYAGQLLSL DIPTSELTLK EALYGVDGLE |
| ef173420-17 | FSKYKGNVEI DITENMQIAI DQYSGQLLSL DIPTNELSLK EALYGTDGLE |
| hrv-26 | FSKYKGNVDM EISDNMKVAI DHYAGQLLSL DIPTQELSLK EALYGTDGLE |
| hrv-27 | FSKYKGNVKM EISENMTIAI DHYAGQLLSL DIPTKELSLK EALYGTDGLE |
| ef173421-27 | FSKYKGNVKM EISENMTIAI DHYAGQLLSL DIPTKELSLK EALYGTDGLE |
| dq473487-35 | FSKYKGNVEM KPTDNMLVAV DHYAGQLMSL DIPTTELTLK EALYGVDGLE |
| hrv-35 | FSKYKGNVEM KPTDNMLVAV DHYAGQLMSL DIPTTELTLK EALYGVDGLE |
| ef173423-37 | FSKYKGNVEM KPTENMLVAV DHYAGQLMSL DIPTEELTLK EALYGVDGLE |
| hrv-42 | FSKYKGNVKM EITENMKVAI DHYAGQLLSL DIPTQELTLK EALYGTDGLE |
| dq473488-48 | FSKYKGNVET NITENMQIAI DQYSGQLLSL DIPTEELTLK DALYGTDGLE |
| hrv-52 | FSKYKGNVEI DITENMQVAI DQYSGQLLSL DIPTEELSLK EALYGTDGLE |
| hrv-52-f10 | FSKYRGNVET DITENMQVAI DQYSGQLLSL DISTDELSLK EALYGTDGLE |
| ef173424-52 | FSKYKGNVEI DITENMQVAI DQYSGQLLSL DIPTEELSLK EALYGTDGLE |
| hrv-69 | FSKYKGNVEV DITENMQVAI DHYSGQLLSL DIPTDEMSLK EALYGTDGLE |
| dq473489-70 | FSKYKGNVEI DITENMQIAI DQYSGQLLSL DIPTDELSLK EALYGTDGLE |
| hrv-72 | FSKYKGNVEM EPTENMLVAV DHYAGQLLSL DIPTEELTIK EALYGVDGLE |
| hrv-79 | FSKYKGNVEM KPTDNMLVAI DHYAGQLMSL DIPTNELTLK EALYGVDGLE |
| hrv-83 | FSKYKGNVEM KPTENMLIAV DHYAGQLMSL DIPTGELSLK EALYGVDGLE |
| hrv-84 | FSKYKGNVNM KMTENMKVAV DHYAGQLMSL EIPTEELSLK EALYGTDGLE |
| hrv-86 | FSKYKGNVEM KPTPNMIVAV DHYAGQLMSL DIPVKELSLK EALYGVDGLE |
| hrv-91 | FSKYKGNIEI DITENMQIAI DQYSGQLLSL DIPTNELSLK EALYGTDGLE |
| hrv-92 | FSKYKGNVEM KPTENMLVAV DHYAGQLLSL DIPTDELSLK EALYGVDGLE |
| ef173425-93 | FSKYKGNVKM EISDNMIIAV DHYAGQLLSL DIPTRELSLK EALYGTDGLE |
| hrv-97 | FSKYKGNVKI EITENMCIAI DHYAGQLLSL DIPTKELSLK EALYGTDGLE |
| hrv-99 | FSKYKGNVKM EMTENMKVAV DHYAGQLLSL DIPTQELTLK EALYGTDGLE |
| | 1901 1950 |
| annotation | .......... HHHHH..HHH HH........ HHHHHHHHHH H....BBBBB |
| af499637-cva13 | ALDLSTSAGY PYVAMGKKKR DILNKQTRDT KEMQRLLDTY GINLPLVTYV |
| af546702-cva21 | ALDLSTSAGY PYVAMGKKKR DILDKQTRDT KEMQRLLDTY GINLPLVTYV |
| v01149-pv1m | ALDLSTSAGY PYVAMGKKKR DILNKQTRDT KEMQKLLDTY GINLPLVTYV |
| d00239-01 | ALDLNTSAGF PYVTMGIKKR DLINNKTKDI SRLKEALDKY GVDLPMITFL |
| pico-01 | ALDLNTSAGF PYVTMGIKKR DLINNKTKDI SRLKEALDKY GVDLPMITFL |
| hrv-01 | ALDLNTSAGF PYVTMGIKKR DLINNKTKDI SRLKEALDKY GVDLPMITFL |
| x02316-02 | ALDLNTSAGF PYIAMGVKKR DLINNKTKDI SKLKEAIDKY GVDLPMVTFL |
| hrv-07 | ALDLNTSAGF PYVSLGIKKK DLIDKKARDI SKLRKAIDKY GIDLPMVTFL |
| dq473503-07 | ALDLNTSAGF PYVSLGIKKK DLIDKKARDI SKLRKAIDKY GIDLPMVTFL |
| hrv-08 | ALDLNTSAGF PYVALGIKKK DIINKSTRDT SKIKNCLDTY GVDLPMITYL |
| pico-09 | ALDLNTSAGF PYVSMGIKKR DLINNNTKDI SKLRAALDKY GVDLPMVTFL |
| hrv-09 | ALDLNTSAGF PYVSMGIRKR DLINNSTKDI SKLRAALDKY GVDLPMVTFL |
| hrv-09-f01 | ALDLNTSAGF PYVSMGIKKR DLINNSTKDI SKLRAALDKY GVDLPMVTFL |
| hrv-09-f02 | ALDLNTSAGF PYVSMGIKKR DLINNSTKDI SKLRAALDKY GVDLPMVTFL |
| dq473498-10 | ALDLNTSAGF PYVSMGIKKK DLINKQTKDV TKLKMALDKY GVDLPMVTFL |
| hrv-10 | ALDLNTSAGF PYVSMGIKKK DLINKQTKDV TKLKMALDKY GVDLPMVTFL |
| ef173414-11 | ALDLNTSAGY PYVTMGIKKK DLIDNRNKDL TKLKVALDKY GVDLPMVTFL |
| ef173415-12 | ALDLNTSAGY PYTSLGIKKR DLIGRD.KDL SKLKAAINKY GLDLPMITFL |
| hrv-13 | ALDLNTSAGF PYISMGIKKR DLINNSTKDI TKLKLALDKY GVDLPMVTFL |
| hrv-13-f03 | ALDLNTSAGF PYISMGIKKR DLINNTTKDI TKLKLALDKY GVDLPMVTFL |
| dq473493-15 | ALDLNTSAGF PYISLGIKKR DLINNNTKDL SRLKSALDKY GVDLPMVTFL |
| l24917-16 | ALDLNTSAGY PYVTLGIKKK DLINNKTKDI SKLKLALDKY DVDLPMITFL |
| hrv-18 | ALDLNTSAGF PYVSMGIRKR DLINKQTKDI TKLKLALDKY GVDLPMVTFL |
| hrv-19 | ALDLNTSAGF PYISMGIKKR DLINNSTKDI SKLKMALDKY GVDLPMVTFL |
| hrv-20 | ALDLHTSAGY PYTACGIKKK DLIPKD.KNL TKLKHAIEKY GLDLPMITFL |
| hrv-21 | ALDLNTSAGF PYVTMGIKKR DLINKQTKDI TKLKMALDKY GVDLPMVTFL |
| hrv-22 | ALDLNTSAGF PYISMGIKKR DLINNSTKDI SKLKLALDKY GVDLPMVTFL |
| dq473497-23 | ALDLNTSAGF PYITMGIKKR DLINNKTKDI SKLREALDKY GVDLPMVTFL |
| hrv-24 | ALDLNTSAGF PYVTMGIKKR DLINKQTRDI TKLKMAMDKY GVDLPMVTFL |
| ef173416-24 | ALDLNTSAGF PYVTMGIKKR DLINKQTRDI TKLKMAMDKY GVDLPMVTFL |
| hrv-25 | ALDLNTSAGF PYVSMGIKKR DLINKQTKDL TKLKVALDKY GVDLPMVTFL |
| dq473508-28 | ALDLHTSAGY PYTACGIKKK DLIPKD.RNL TKLKCAIEKY GLDLPMITFL |
| hrv-29 | ALDLNTSAGF PYISMGIKKR DLINKQTKDV TKLKMALDKY GVDLPMVTFL |
| dq473512-30 | ALDLNTSAGF PYITMGIKKR DLINNRTKDI SKLKEAIDKY GVDLPMVTFL |
| hrv-30 | ALDLNTSAGF PYITMGIKKR DLINNRTKDI SKLKEAIDKY GVDLPMVTFL |
| hrv-31 | ALDLTTSAGF PYVSMGIKKR DLINKQTKDI TKLKMALDKY GVDLPMVTFL |
| hrv-32 | ALDLNTSAGF PYISMGIKKR DLINNSTKDI SKLKIALDKY GVDLPMVTFL |
| hrv-33 | ALDLNTSAGY PYVTMGIKKK DLIDNRAKDL TKLKIAMDKY GVDLPMVTFL |
| hrv-34 | ALDLNTSAGF PYVSMGIKKR DLINKQTKDI SKLKLALDKY GVDLPMVTFL |
| dq473501-34 | ALDLNTSAGF PYVSMGIKKR DLINKQTKDI SKLKLALDKY GVDLPMVTFL |
| dq473505-36 | ALDLNTSAGF PYVSLGIKKK DLIDKKTKDI TKLKKAIDKY GIDLPMVTFL |
| hrv-38 | ALDLNTSAGF PYVSMGVKKR DLINKQTKDV TRLKAAMDKY GVDLPMVTFL |
| dq473495-38 | ALDLNTSAGF PYVSMGVKKR DLINKQTKDV TRLKAAMDKY GVDLPMVTFL |
| ay751783-39 | ALDLNTSAGF PYITMGIKKR DLINNKTKDI SRLKQAIDKY GVDLPMVTFL |
| hrv-40 | ALDLNTSAGF PYVSMGIKKR DLINKQTKDI TKLKAALDKY GVDLPMVTFL |
| dq473491-41 | ALDLNTSAGF PYISMGIKKR DLINNSTKDI TKLKIALDKY GVDLPMVTFL |
| hrv-43 | ALDLNTSAGF PYISMGIKKR DLINKNTRDI SKLKAALDKY GVDLPMVTFL |
| dq473499-44 | ALDLNTSAGF PYISMGIKKR DLINKQTKDV TKLKMALDKY GVDLPMVTFL |
| hrv-45 | ALDLNTSAGF PYVALGIKKK DLINRETRDV SKIKNCLDTY GVDLPMITYL |
| dq473506-46 | ALDLHTSAGY PYTAHGIKKK DLIPKD.RNL TKLKVAMEKY GLDLPMITFL |
| hrv-47 | ALDLTTSAGF PYVSMGIKKR DLINKQTRDI TKLKMALDKY GVDLPMVTFL |
| dq473496-49 | ALDLNTSAGF PYITMGIKKR DLINNKTKDI SKLREAIDKY GVDLPMVTFL |
| hrv-49-f04 | ALDLNTSAGF PYITMGIKKR DLINNKTKDI SKLREAIDKY GVDLPMVTFL |
| hrv-50 | ALDLNTSAGF PYVSMGIKKR DLINKQTKDI SKLKMALDKY GVDLPMVTFL |
| hrv-51 | ALDLHTSAGY PYTACGIKKK DLIPKD.RDL TKFKQALEKY GLDLPMITFL |
| dq473507-53 | ALDLHTSAGY PYTAHGIKKK DLIPKD.KNL TKLKIAMEKY GLDLPMITFL |
| hrv-54 | ALDLTTSAGF PYVSMGIKKR DLINKQTKDI TKLKMALDKY GVDLPMVTFL |
| hrv-54-f05 | ALDLTTSAGF PYVSMGIKKR DLINKQTKDI TKLKIALDKY GVDLPMVTFL |
| dq473511-55 | ALDLNTSAGF PYVTMGIKKR DLINKQTKDI SKLKIALDKY GVDLPMVTFL |
| hrv-56 | ALDLNTSAGF PYVSMGIKKK DLINKQTKDL TKLKIALDKY GVDLPMVTFL |
| hrv-57 | ALDLNTSAGF PYVAMGIKKR DLINKQTRDI TKLKMALDKY GVDLPMVTFL |
| hrv-58 | ALDLNTSAGF PYVSLGIKKK DLIDKKTKDI TKLKKAIDKY GIDLPMVTFL |
| dq473500-59 | ALDLNTSAGF PYVAMGIKKK DLIDNRTKDI SKLKVALDKY GVDLPMVTFL |
| hrv-60 | ALDLNTSAGF PYVSMGIKKR DLINKQTKDI TKLKMAMDKY GVDLPMVTFL |
| hrv-61 | ALDLNTSAGF PYISMGIRKR DLINNSTKDI TKLKVALDKY GVDLPMVTFL |
| hrv-62 | ALDLNTSAGF PYVSMGIKKR DLINKQTRDL TKLKVALDKY GVDLPMVTFL |
| hrv-63 | ALDLNTSAGF PYVSMGIKKR DLINKQTKDI TKLKVALDKY GVDLPMVTFL |
| hrv-64 | ALDLNTSAGF PYISMGIKKR DLINNSTKDI SKLKLALDKY GVDLPMVTFL |
| ef173417-64 | ALDLNTSAGF PYISMGIKKR DLINNSTKDI SKLKLALDKY GVDLPMVTFL |
| hrv-65 | ALDLHTSAGY PYTACGIKKK DLIPKD.KNL TKLKQAMEKY GLDLPMITFL |
| hrv-66 | ALDLNTSAGF PYVTMGVKKR DLINKQTKDV TKLKAAMDKY GVDLPMVTFL |
| hrv-67 | ALDLNTSAGF PYISMGIKKR DLINNSTKDI SKLKIALDKY GVDLPMVTFL |
| hrv-68 | ALDLHTSAGY PYTACGIKKK DLIPKD.RNL TRLKCAIEKY GLDLPMITFL |
| hrv-71 | ALDLHTSAGY PYTACGIKKK DLIPKN.RDL SKLKGAIEKY GLDLPMITFL |
| dq473492-73 | ALDLNTSAGF PYISMGIRKK DLINNSTKDI TKLKLALDKY GVDLPMVTFL |
| dq473494-74 | ALDLNTSAGF PYISMGIKKR DLINNSTKDI SKLKTALDKY GVDLPMVTFL |
| dq473510-75 | ALDLNTSAGF PYISMGIKKR DLINNTTKDL SKLKAAMDKY GVDLPMVTFL |
| dq473502-76 | ALDLNTSAGY PYVTMGIKKK DLIDNRNKDL TKLKIAMDKY GVDLPMVTFL |
| hrv-76 | ALDLNTSAGY PYVTMGIKKK DLIDNRNKDL TKLKIAMDKY GVDLPMVTFL |
| hrv-77 | ALDLNTSAGF PYVSMGIKKR DLINKQTKDI TKLKVALDKY GVDLPMVTFL |
| hrv-78 | ALDLHTSAGY PYTTMGIKKK DLINTKTKDV TKLKEVMNKY GVDLPMITFL |
| ef173418-78 | ALDLHTSAGY PYTTMGIKKK DLINTKTKDV TKLKEVMNKY GVDLPMITFL |
| hrv-80 | ALDLHTSAGY PYTANGIKKK DLIPKD.RDL TKLKLAMEKY GLDLPMITFL |
| hrv-81 | ALDLNTSAGY PYVALGIKKK DLINNKTKDI SKLKVALDKY GVDLPMITFL |
| hrv-81-f06 | ALDLNTSAGY PYVSLGIKKR DLINNKTKDI SKLKVALDKY GVDLPMITFL |
| hrv-81-f07 | ALDLNTSAGY PYVSLGIKKR DLINNKTKDI SKLKVALDKY GVDLPMITFL |
| hrv-82 | ALDLNTSAGF PYISMGIKKR DLIDKSTKDI SKLKVALDKY GVDLPMVTFP |
| dq473509-82 | ALDLNTSAGF PYISMGIKKR DLIDKNTKDI SKLKIALDKY GVDLPMVTFL |
| hrv-85 | ALDLNTSAGF PYVSMGIRKR DLINKQTKDI TKLKMALDKY GVDLPMVTFL |
| pico-85 | ALDLNTSAGF PYVSMGIRKR DLINKQTKDI TKLKMALDKY GVDLPMVTFL |
| dq473504-88 | ALDLSTSAGF PYVSLGIKKK DLIDKKTKDI TKLKKAIDEY GLDLPMVTFL |
| a10937-89 | ALDLNTSAGF PYVSLGIKKK DLIDKKTKDI TKLRKAIDEY GIDLPMVTFL |
| hrv-89 | ALDLNTSAGF PYVSLGIKKK DLIDKKTKDI TKLRKAIDEY GIDLPMVTFL |
| hrv-89-f08 | ALDLNTSAGF PYVSLGIKKK DLIDKKTRDI TKLKKAIDEY GIDLPMVTFL |
| hrv-89-f09 | ALDLNTSAGF PYVSLGIKKK DLIDKRTRDI TKLKKAIDEY GIDLPMVTFL |
| m16248-89 | ALDLNTSAGF PYVSLGIKKK DLIDKKTKDI TKLRKAIDEY GIDLPMVTFL |
| hrv-90 | ALDLNTSAGF PYVTMGIKKR DLINKQTKDI TKLKMAMDKY GVDLPMVTFL |
| hrv-94 | ALDLNTSAGF PYISMGIKKR DLINNSTKDI SKLKIALDKY GVDLPMVTFL |
| ef173419-94 | ALDLNTSAGF PYISMGIKKR DLINNSTKDI SKLKIALDKY GVDLPMVTFL |
| hrv-95 | ALDLNTSAGF PYVALGIKKK DIINKSTRDT SKIKNCLDTY GVDLPMITYL |
| hrv-96 | ALDLNTSAGF PYISMGIRKR DLINNNTKDI TKLKIALDKY GVDLPMVTFL |
| hrv-98 | ALDLTTSAGF PYVSMGIKKR DLINKQTKDI TKLKIALDKY GVDLPMVTFL |
| hrv-100 | ALDLNTSAGF PYVSMGIKKR DLINKQTKDV TKLKMALDKY GVDLPMVTFL |
| ef186077-qpm | PLDLTTSAGF PYVTMGVKKR DILNRNTRDV TKLQHMIDTY GLDLPYVTYL |
| ef077279-nat001 | PLDLTTSAGF PYVTMGVKKR DILNRNTKDV TKLQHMIDTY GLDLPYITYL |
| ny1078 | PLDLTTSAGF PYVTMGVKKR DILNRITKDT TKLQEMIDTY GLDLPYITYL |
| ef582385-c024 | PLDLTTSPGF PYVSLGVKKK DILNNATKDT RKMQQMLDLY GIDLPYITFL |
| ef077280-nat045 | ALDLTTSAGF PYVSKGIKKK DILNKTTRDT TKLAKLMEEY GIDLPYVTYL |
| ef582387-c026 | PLDLTTSAGF PYVTMGIKKR DILNRNTKDI TKLQQMIDTY GLDLPYVTYL |
| ef582386-c025 | PLDLNTSAGY PYVTLGVKKR DILNRNTKDL SKLQHMMDLY GIDLPYITYL |
| dq473485-03 | PIDVTTSAGY PYVSLGIKKR DILNKETQDV EKMKFYLDKY GIDLPLVTYI |
| ef173422-03 | PIDVTTSAGY PYVSLGIKKR DILNKETQDV EKMKFYLDKY GIDLPLVTYI |
| dq473490-04 | PIDLNTSAGY PYVSLGINKK SILNRETKEV AKMQECLSKY GIDLPLITYI |
| hrv-05 | PIDLNTSAGY PYVSLGIKKR SILNKETKDT SKMEECLSKY GIDLPLVTYI |
| dq473486-06 | PIDITTSAGY PYVSLGIKKR DILNRETQEV EKMKFYLDKY GIDLPLVTYI |
| l05355-14 | PIDITTSAGF PYVSLGIKKR DILNKETQDT EKMKFYLDKY GIDLPLVTYI |
| k02121-14 | PIDITTSAGF PYVSLGIKKR DILNKETQDT EKMKFYLDKY GIDLPLVTYI |
| ef173420-17 | PIDINTSAGY PYVSLGIKKR DILNRDTQDI AKMEHYLDKY GIDLPLVTYI |
| hrv-26 | PIDLNTSAGY PYVSLGIKKR AILNKDTKDT SKMEECLSKY GIDLPLVTYI |
| hrv-27 | PIDLNTSAGY PYVSLGIKKR AILNKETQDT TKMEECLSKY GIDLPLVTYI |
| ef173421-27 | PIDLNTSAGY PYVSLGIKKR AILNKETQDT TKMEECLSKY GIDLPLVTYI |
| dq473487-35 | PIDVTTSAGY PYVSLGIKKR DILNRETQEV EKMKFYLDKY GIDLPLVTYI |
| hrv-35 | PIDVTTSAGY PYVSLGIKKR DILNRETQEV EKMKFYLDKY GIDLPLVTYI |
| ef173423-37 | PIDVTTSAGY PYVSLGIKKR DILNRETQET EKMKFYLDKY GIDLPLVTYI |
| hrv-42 | PIDLNTSAGY PYVSLGIKKR SILNKETKDT TKMEECLSKY GIDLPLVTYI |
| dq473488-48 | PIDVNTSAGY PYVSLGIRKR DILNKETQDT IKMEHYLDKY GIDLPLVTYI |
| hrv-52 | PIDINTSAGY PYVSLGIKKK DILNRETQDT SKMEHYLDKY GIDLPLVTYI |
| hrv-52-f10 | PIDINTSAGY PYVSLGIKKK DILNRETQDT SKMEHYLDKY GIDLPLVTYI |
| ef173424-52 | PIDINXSAGY PYVSLGIKKK DILNRETQDT SKMEHYLDKY GIDLPLVTYI |
| hrv-69 | PIDINTSAGY PYVSLGIKKK DILNRETQDT SKMEHYLDKY GIDLPLVTYI |
| dq473489-70 | PIDINTSAGY PYVSLGIKKR DILNRDTQDV TKMEHYLDKY GIDLPLVTYI |
| hrv-72 | PIDVTTSAGY PYVSLGIKKR DIINKETKDV EKMKYYLDKY GIDLPLVTYI |
| hrv-79 | PIDVTTSAGY PYVSLGIKKR DILNKETQDT EKMKFYLDKY GIDLPLVTYI |
| hrv-83 | PIDITTSAGY PYVSLGIKKR DILNKETQEV EKMKFYLDKY GIDLPLVTYI |
| hrv-84 | PIDLNTSAGY PYVGLGIKKR SILNKETQDT TKMQECLSKY GIDLPLITYI |
| hrv-86 | PLDITTSAGY PYVSLGIKKR DILNRETQDX TKMQAYLDKY GIDLPLVTYI |
| hrv-91 | PIDINTSAGY PYVSLGIKKR DILNKDTQDV AKMEHYLDKY GIDLPLVTYI |
| hrv-92 | PIDITTSAGY PYVSLGIKKR DILNKETQET EKMKFYLDKY GIDLPLVTYI |
| ef173425-93 | PIDLNTSAGY PYVSLGIKKR SILNKETQDT TKMEECLDKY GIDLPLVTYI |
| hrv-97 | PIDLNTSAGY PYVSLGIKKR SILNKETKDT AKMEECLSKY GIDLPLVTYI |
| hrv-99 | PIDLNTSAGY PYVNLGIKKR SILNKETKDT TKMEECLSKY GIDLPLVTYI |
| | 1951 2000 |
| annotation | .....HHHHH HH....BBBB .HHHHHHHHH HHHHHHHHHH HH........ |
| af499637-cva13 | KDELRSKTKV EQGKSRLIEA SSLNDSVAMR MAFGNLYAAF HKNPGVVTGS |
| af546702-cva21 | KDELRSKTKV EQGKSRLIEA SSLNDSVAMR MAFGNLYAAF HKNPGVVTGS |
| v01149-pv1m | KDELRSKTKV EQGKSRLIEA SSLNDSVAMR MAFGNLYAAF HKNPGVITGS |
| d00239-01 | KDELRKKEKI SAGKTRVIEA SSINDTILFR TTFGNLFSKF HLNPGVVTGS |
| pico-01 | KDELRKKEKI STGKTRVIEA SSINDTILFR TTFGNLFSKF HLNPGVVTGS |
| hrv-01 | KDELRKKEKI STGKTRVIEA SSINDTILFR TTFGNLFSKF HLNPGVVTGS |
| x02316-02 | KDELRKHEKV IKGKTRVIEA SSVNDTLLFR TTFGNLFSKF HLNPGIVTGS |
| hrv-07 | KDELRRKEKI KEGKTRVIEA NSVNDTVVFR STFGNLFSTF HKNPGIVTGS |
| dq473503-07 | KDELRRKEKI KEGKTRVIEA NSVNDTVVFR STFGNLFSTF HKNPGIVTGS |
| hrv-08 | KDELRAPEKV KMGKTRVIEA SSLNDTVHMR MLFGNLFKAF HANPGIITGC |
| pico-09 | KDELRKKEKI SSGKTRVIEA SSINDTVTFR MTYGNLFACF HKNPGIVTGS |
| hrv-09 | KDELRKKEKI SSGKTRVIEA SSINDTVAFR MTYGNLFACF HKNPGIITGS |
| hrv-09-f01 | KDELRKKEKI SSGKTRVIEA SSVNDTVAFR MTYGNLFACF HKNPGIVTGS |
| hrv-09-f02 | KDELRKKEKI SSGKTRVIEA SSVNDTVAFR MTYGNLFACF HKNPGIVTGS |
| dq473498-10 | KDELRKREKI TAGKTRVIEA SSVNDTVLFR TTFGNLFSKF HLNPGIVTGS |
| hrv-10 | KDELRKREKI TAGKTRVIEA SSVNDTVLFR TTFGNLFSKF HLNPGIVTGS |
| ef173414-11 | KDELRKKEKI SAGKTRVIEA SSVNDTVLFR SIYGNLFSKF HLNPGVVTGS |
| ef173415-12 | KDELRKPEKI KAGKTRVIEA SSINDTIHFR MKFGNLFSSF HLNPGIVTGS |
| hrv-13 | KDELRKKEKI STGKTRVIEA SSVNDTIAFR VVYGNLFSTF HKNPGVVTGS |
| hrv-13-f03 | KDELRKKEKI STGKTRVIEA SSVNDTIAFR VVYGNLFSSF HKNPGVVTGS |
| dq473493-15 | KDELRKKEKI SAGKTRVIEA SSVNDTVTFR MVYGNLFSTF HKNPGIITGS |
| l24917-16 | KDELRKKDKI AAGKTRVIEA SSINDTILFR TVYGNLFSKF HLNPGVVTGC |
| hrv-18 | KDELRKKEKI SAGKTRVIEA SSVNDTVLFR TTFGNLFSKF HLNPGIVTGS |
| hrv-19 | KDELRKKEKI SAGKTRVIEA SSINDTVAFR IVYGKLFAAF HKNPGVVTGS |
| hrv-20 | KDELRKPEKI KTGKTRIIEA SSLNDTVQFR MAFGNLFSKF HQNPGIITGS |
| hrv-21 | KDELRKKEKI SAGKTRVIEA SSVNDTVLFR TTFGNLFSKF HLNPGIVTGS |
| hrv-22 | KDELRKKEKI AAGKTRVIEA SSVNDTVAFR MVYGNLFSAF HKNPGIVTGS |
| dq473497-23 | KDELRKQEKI IKGKTRVIEA SSVNDTLLFR TTFGNLFSKF HLNPGIVTGS |
| hrv-24 | KDELRKREKI SAGKTRVIEA SSVNDTVLFR TTFGNLFSKF HLNPGIVTGS |
| ef173416-24 | KDELRKREKI SAGKTRVIEA SSVNDTVLFR TTFGNLFSKF HLNPGIVTGS |
| hrv-25 | KDELRKKEKI RAGKTRVIEA SSVNDTILFR TTFGNLFSKF HLNPGIITGS |
| dq473508-28 | KDELRKPEKI KTGKTRIIEA SSLNDTVQFR MAFGNLFSKF HQNPGIVTGS |
| hrv-29 | KDELRKREKI CAGKTRVIEA SSVNDTILFR TTFGNLFSKF HLNPGVVTGS |
| dq473512-30 | KDELRKPEKI SKGKTRVIEA SSVNDTLLFR TTFGNLFSKF HLNPGIVTGS |
| hrv-30 | KDELRKPEKI SKGKTRVIEA SSVNDTLLFR TTFGNLFSKF HLNPGIVTGS |
| hrv-31 | KDELRKKEKI ATGKTRVIEA SSVNDTILFR TTFGNLFSKF HLNPGIVTGS |
| hrv-32 | KDELRKKEKI PSGKTRVIEA SSVNDTIAFR MTYGNLFACF HKNPGVVTGS |
| hrv-33 | KDELRKKEKI SAGKTRVIEA SSVNDTVLFR SVYGNLFSKF HLNPGIITGS |
| hrv-34 | KDELRKKEKI SAGKTRVIEA SSVNDTVLFR TTFGNLFSKF HLNPGIVTGS |
| dq473501-34 | KDELRKKEKI SAGKTRVIEA SSVNDTVLFR TTFGNLFSKF HLNPGIVTGS |
| dq473505-36 | KDELRKKEKI RDGKTRVIEA NSVNDTVLFR SVYGNLFSAF HRNPGIVTGS |
| hrv-38 | KDELRKQEKI SAGKTRVIEA SSVNDTVMFR TTFGNLFSKF HLNPGIVTGS |
| dq473495-38 | KDELRKQEKI SAGKTRVIEA SSVSDTVMFR TNFGNLFSKF HLNPGIVTGS |
| ay751783-39 | KDELRKEEKI AKGKTRVIEA SSVNDTLLFR TTFGNLFSKF HLNPGIVTGS |
| hrv-40 | KDELRKKEKI SAGKTRVIEA SSVNDTVLFR ATFGNLFSKF HLNPGIVTGS |
| dq473491-41 | KDELRKKEKI AAGKTRVIEA SSVNDTIAFR VTYGNLFSTF HRNPGIITGS |
| hrv-43 | KDELRKKEKI SAGKTRVIEA SSVNDTVAFR MIYGNLFAAF HKNPGIVTGS |
| dq473499-44 | KDELRKREKI CDGKTRVIEA SSVNDTILFR TTFGNLFSKF HLNPGVVTGS |
| hrv-45 | KDELRTPEKI KLGKTRVIEA SSLNDTIHMR MLFGNLFKAF HANPGIVTGC |
| dq473506-46 | KDELRKPEKI SAGKTRIIEA SSLNDTVQFR MAFGNLFSKF HKNPGIVTGS |
| hrv-47 | KDELRKKEKI SAGKTRVIEA SSVNDTVLFR TTFGNLFSKF HLNPGIVTGS |
| dq473496-49 | KDELRKHEKI IKGKTRVIEA SSVNDTLLFR TTFGNLFSKF HLNPGIITGS |
| hrv-49-f04 | KDELRKHEKI IKGKTRVIEA SSVNDTLLFR TTFGNLFSKF HLNPGIVTGS |
| hrv-50 | KDELRKKEKI SAGKTRVIEA SSVNDTVLFR TTFGNLFSKF HLNPGIVTGS |
| hrv-51 | KDELRKPEKI LAGKTRIIEA SSLNDTVQFR MAFGRLFSAF HQNPGIVTGS |
| dq473507-53 | KDELRKPEKI SAGKTRIIEA SSLNDTVQFR MAFGNLFSKF HKNPGIVTGS |
| hrv-54 | KDELRKKEKI SAGKTRVIEA SSVNDTVLFR TTFGNLFSKF HLNPGIVTGS |
| hrv-54-f05 | KDELRKKEKI HTGKTRVIEA SSVNDTVLFR TTFGNLFSKF HLNPGIVTGS |
| dq473511-55 | KDELRKKDKI SAGKTRVIEA SSVNDTVLFR TTFGNLFSKF HLNPGVVTGS |
| hrv-56 | KDELRKKEKI AAGKTRVIEA SSVNDTILFR TTFGNLFSKF HLNPGIVTGS |
| hrv-57 | KDELRKKEKI SAGKTRVIEA SSVNDTVLFR TTFGNLFSKF HLNPGIVTGS |
| hrv-58 | KDELRKKEKI RDGKTRVIEA NSVNDTVLFR SVYGNLFSTF HKNPGIVTGS |
| dq473500-59 | KDELRKKDKI RAGKTRVIEA SSINDTLLFR TTFGNLFSKF HLNPGIVTGS |
| hrv-60 | KDELRKQEKI SAGKTRVIEA SSVNDTVLFR TTFGNLFSKF HLNPGIVTGS |
| hrv-61 | KDELRKKGKI MAGKTRVIEA SSINDTVAFR MTYGKLFSSF HKNPGIITGS |
| hrv-62 | KDELRKKEKI CAGKTRVIEA SSVNDTILFR TTFGNLFSKF HLNPGIITGS |
| hrv-63 | KDELRKKEKI SAGKTRVIEA SSVNDTVLFR TTFGNLFSKF HLNPGIVTGS |
| hrv-64 | KDELRKKEKI SAGKTRVIEA SSVNDTVAFR MVYGNLFAAF HKNPGIITGS |
| ef173417-64 | KDELRKKEKI SAGKTRVIEA SSVNDTVAFR MVYGNLFAAF HKNPGIITGS |
| hrv-65 | KDELRKPDKI YTGKTRIIEA SSLNDTVQFR MAFGRLFSSF HQNPGIITGS |
| hrv-66 | KDELRKKEKI SAGKTRVIEA SSVNDTILFR MTFGNLFSKF HLNPGVVTGS |
| hrv-67 | KDELRKKEKI SSGKTRVIEA SSINDTITFR MTYGNLFSCF HKNPGVVTGS |
| hrv-68 | KDELRKPEKI KTGKTRIIEA SSLNDTIQFR MAFGNLFSKF HQNPGIVTGS |
| hrv-71 | KDELRKPEKI NTGKTRIVEA SSLNDTVQFR MAFGRLFSVF HQNPGIITGS |
| dq473492-73 | KDELRKKEKI STGKTRVIEA SSVNDTIAFR VVYGNLFSTF HKNPGVVTGS |
| dq473494-74 | KDELRKKEKI SAGKTRVIEA SSINDTVTFR MVYGNLFTNF HKNPGVVTGS |
| dq473510-75 | KDELRKKEKI SAGKTRVIEA SSINDTIIFR QTYGNLFAAF HKNPGIITGS |
| dq473502-76 | KDELRKKEKI SAGKTRVIEA SSVNDTVLFR SVYGNLFSKF HLNPGIITGS |
| hrv-76 | KDELRKKEKI SAGKTRVIEA SSVNDTVLFR SVYGNLFSKF HLNPGIITGS |
| hrv-77 | KDELRKKEKI SAGKTRVIEA SSINDTVLFR STFGNLFSKF HLNPGIITGS |
| hrv-78 | KDELRKKDKI VAGKTRVIEA SSINDTVQFR MTFGRLFQAF HNNPGIVTGS |
| ef173418-78 | KDELRKKDKI VAGKTRVIEA SSINDTVQFR MTFGRLFQAF HNNPGIVTGS |
| hrv-80 | KDELRKPEKI REGKTRIIEA SSLNDTVHFR VTFGNLFSKF HQNPGIVTGS |
| hrv-81 | KDELRKKDKI PVGKTRVIEA SSINDTVLFR TTYGNLFSKF HLNPGVVTGC |
| hrv-81-f06 | KDELRKKDKI SAGKTRVIEA SSINDTILFR TTYGNLFSKF HLNPGVVTGC |
| hrv-81-f07 | KDELRKKDKI SAGKTRVIEA SSINDTILFR TTYGNLFSKF HLNPGVVTGC |
| hrv-82 | KDELRKKEKI SSGKTRVIEA SSVNDTVAFR MVYGNLFAAF HKNPGIVTGS |
| dq473509-82 | KDELRKKEKI SSGKTRVIEA SSVNDTVAFR MVYGNLFAAF HKNPGIVTGS |
| hrv-85 | KDELRKKEKI SAGKTRVIEA SSVNDTVLFR TTFGNLFSKF HLNPGIVTGS |
| pico-85 | KDELRKKEKI SAGKTRVIEA SSVNDTVLFR TTFGNLFSKF HLNPGIVTGS |
| dq473504-88 | KDELRRKEKI KDGKTRVIEA NSVNDTVIFR SVFGNLFSAF HKNPGVVTGS |
| a10937-89 | KDELRKKEKI KDGKTRVIEA NSVNDTVLFR SVFGNLFSAF HKNPGIVTGS |
| hrv-89 | KDELRKKEKI KDGKTRVIEA NSVNDTVLFR SVFGNLFSAF HKNPGIVTGS |
| hrv-89-f08 | KDELRKKEKI KDGKTRVIEA NSVNDTVLFR SVFGNLFSAF HKNPGIVTGS |
| hrv-89-f09 | KDELRKKEKI KDGKTRVIEA NSVNDTVLFR SVFGNLFSAF HKNPGIVTGS |
| m16248-89 | KDELRKKEKI KDGKTRVIEA NSVNDTVLFR SVFGNLFSAF HKNPGIVTGS |
| hrv-90 | KDELRKKEKI SAGKTRVIEA SSVNDTVLFR TTFGNLFSKF HLNPGVVTGS |
| hrv-94 | KDELRKKXKI STGKTRVIEA SSVNDTVAFR MVYGNLFSAF HRNPGIVTGS |
| ef173419-94 | KDELRKKGKI STGKTRVIEA SSVNDTVAFR MVYGNLFSAF HRNPGIVTGS |
| hrv-95 | KDELRAPEKV KMGKTRVIEA SSLNDTVHMR MLFGNLFKAF HANPGIITGC |
| hrv-96 | KDELRKKEKI SAGKTRVIEA SSINDTVAFR MVYGRLFSTF HKNPGIITGS |
| hrv-98 | KDELRKREKI SAGKTRVIEA SSVNDTVLFR TTFGNLFSKF HLNPGIVTGS |
| hrv-100 | KDELRKKEKI RAGKTRVIEA SSVNDTVLFR TTFGNLFSKF HLNPGIVTGS |
| ef186077-qpm | KDELRAPAKV KAGKTRAIEA ASMNDTANFR RVFGNLYAGF HANPGILTGS |
| ef077279-nat001 | KDELRAPAKI KAGKTRAIEA ASMNDTANFR RVFGNLYAGF HANPGILTGS |
| ny1078 | KDELRSPAKI KAGKTRAIEA ASMNDTANFR RVFGNLYASF HANPGVLTGS |
| ef582385-c024 | KDELRAPEKI KAGKTRIVEA ASVNDTVYFR TTFGNLYSTF HANPGILTGS |
| ef077280-nat045 | KDELRTPEKI KAGKTRLIEA ASLNDTVHYR MVFGNLFSTL HANPGILTGS |
| ef582387-c026 | KDELRAPTKV KAGKTRAIEA ASMNDTANFR RVFGNLYAGF HANPGILTGS |
| ef582386-c025 | KDELRAPEKI RCGKTRCIEA ASMNDTVYFR MVFGNLYGAF HKNPGVLTGS |
| dq473485-03 | KDELRSVDKV RLGKSRLIEA SSLNDSVNMR MKLGNLYKAF HQNPGIITES |
| ef173422-03 | KDELRSVDKV RLGKSRLIEA SSLNDSVNMR MKLGNLYKAF HQNPGIITGS |
| dq473490-04 | KDELRGKDKV RLGKSRLIEA SSLNDSVNMR VKLGNLYKAF HKNPGVLTGS |
| hrv-05 | KDELRGKDKI RLGKSRLIEA SSLNDSVNMR VKLGNLYKAF HKNPGILTGS |
| dq473486-06 | KDELRSTDKV RLGKSRLIEA SSLNDSVNMR MKLGNLYKAF HQNPGIITGS |
| l05355-14 | KDELRSVDKV RLGKSRLIEA SSLNDSVNMR MKLGNLYKAF HQNPGVLTGS |
| k02121-14 | KDELRSVDKV RLGKSRLIEA SSLNDSVNMR MKLGNLYKAF HQNPGVLTGS |
| ef173420-17 | KDELRSKDKV RLGKSRLIEA SSLNDSVNMR VKLGNLYKAF HTNPGVITGS |
| hrv-26 | KDELRGKDKI RLGKSRLIEA SSLNDSVNMR VKLGNLYKAF HKNPGILTGS |
| hrv-27 | KDELRGRDKV RLGKSRLIEA SSLNDSVNMR VKLGELYKAF HKNPGILTGS |
| ef173421-27 | KDELRGRDKV RLGKSRLIEA SSLNDSVNMR VKLGELYKAF HKNPGILTGS |
| dq473487-35 | KDELRSVDKV RLGKSRLIEA SSLNDSVNMR MKLGNLYKAF HKNPGTITGS |
| hrv-35 | KDELRSVDKV RLGKSRLIEA SSLNDSVNMR MKLGNLYKAF HKNPGTITGS |
| ef173423-37 | KDELRSTDKV RLGKSRLIEA SSLNDSVNMR MKLGNLYKAF HQNPGVITGS |
| hrv-42 | KDELRGKDKI RLGKSRLIEA SSLNDSVNMR IKLGNLYKAF HKNPGILTGS |
| dq473488-48 | KDELRGKDKV RLGKSRLIEA SSLNDSVNMR VKLGNLYKAF HLNPGVITGS |
| hrv-52 | KDELRGRDKV RLGKSRLIEA SSLNDSVNMR VKLGNLYKAF HSNPGVITGS |
| hrv-52-f10 | KDELRGKDKV RLGKSRLIEA SSLNDSVNMR VKLGNLYKAF HLNPGVITGS |
| ef173424-52 | KDELRGRDKV RLGKSRLIEA SSLNDSVNMR VKLGNLYKAF HSNPGVITGS |
| hrv-69 | KDELRGKDKV RLGKSRLIEA SSLNDSVNMR VKLGNLYKAF HLNPGVITGS |
| dq473489-70 | KDELRSKDKV RLGKSRLIEA SSLNDSVNMR VKLGNLYKAF HTNPGVITGS |
| hrv-72 | KDELRSTDKV RLGKSRLIEA SSLNDSVNMR MKLGNLYKAF HQNPGTITGS |
| hrv-79 | KDELRSSDKV RLGKSRLIEA SSLNDSVNMR MKLGHLYKAF HQNPGVITGS |
| hrv-83 | KDELRSADKV RLGKSRLIEA SSLNDSVNMR MKLGHLYKTF HQNPGVITGS |
| hrv-84 | KDELRGKVKI RLGKSRLIEA SSLNDSVNMR VKLGHLYKAF HKNPGTLTGS |
| hrv-86 | KDELRSVDKV RLGKSRLIEA SSLNDSVNMR MKLGSLYKTF HQNPGIITGS |
| hrv-91 | KDELRSKDKI RLGKSRLIEA SSLNDSVNMR VKLGNLYKAF HTNPGVITGS |
| hrv-92 | KDELRSADKV RLGKSRLIEA SSLNDSVNMR MKLGHLYKTF HQNPGVITGS |
| ef173425-93 | KDELRGKDKV RLGKSRLIEA SSLNDSVNMR VKLGELYKAF HKNPGIMTGS |
| hrv-97 | KDELRGKDKV RLGKSRLIEA SSLNDSVNMR VKLGELYKAF HKNPGILTGS |
| hrv-99 | KDELRGKDKI RLGKSRLIEA SSLNDSVNMR VKLGNLYKAF HLNPGILTGS |
| | 2001 2050 |
| annotation | ....HHHHHH .HHHHHH..B .BB.BB..HH HHHHHHHHHH HHHHHHHHH. |
| af499637-cva13 | AVGCDPDLFW SKIPVLMEEK .LFAFDYTGY DASLSPAWFE ALKMVLEKIG |
| af546702-cva21 | AVGCDPDLFW SKIPVLMEEK .LFAFDYTGY DASLSPAWFE ALKMVLEKIG |
| v01149-pv1m | AVGCDPDLFW SKIPVLMEEK .LFAFDYTGY DASLSPAWFE ALKMVLEKIG |
| d00239-01 | AVGCDPETFW SKIPVMLDGD CIMAFDYTNY DGSIHPVWFQ ALKKVLENLS |
| pico-01 | AVGCDPETFW SKIPVMLDGD CIMAFDYTNY DGSIHPVWFQ ALKKVLENLS |
| hrv-01 | AVGCDPETFW SKIPVMLDGD CIMAFDYTNY DGSIHPVWFQ ALKKVLENLS |
| x02316-02 | AVGCDPEVFW SKIPAMLDDK CIMAFDYTNY DGSIHPIWFE ALKQVLVDLS |
| hrv-07 | AVGCDPEVFW STIPLMLXGE CLMAFDYSNY DGSLHPIWFK CLKMLLEDIG |
| dq473503-07 | AVGCDPEVFW STIPLMLDGE CLMAFDYSNY DGSLHPIWFK CLKMLLEDIG |
| hrv-08 | AVGCDPEVFW SKIPPMLGDG SVMAFDYTNY DGSLHPVWFK MLEVVLDRLG |
| pico-09 | AVGCDPETFW SKIPVMLDGE CIMAFDYTNY DGSIHPVWFE ALKEILKELK |
| hrv-09 | AVGCDPETFW SKIPVMLDGE CIMAFDYTNY DGSIHPVWFE ALKEILKELK |
| hrv-09-f01 | AVGCDPETFW SKIPVMLDGE CIMAFDYTNY DGSIHPVWFE ALKEILKELK |
| hrv-09-f02 | AVGCDPETFW SKIPVMLDGE CIMAFDYTNY DGSIHPVWFE ALKEILKELK |
| dq473498-10 | AVGCDPETFW SKIPVMLDGE CIMAFDYTNY DGSIHPMWFQ ALKEVLSNLS |
| hrv-10 | AVGCDPETFW SKIPVMLDGE CIMAFDYTNY DGSIHPMWFQ ALKEVLSNLS |
| ef173414-11 | AVGCDPETFW SKIPVMLDGE CIMAFDYTNY DGSIHPIWFD ALKIVLANLS |
| ef173415-12 | AVGCDPDVFW SKIPLMLDGD CLMAFDYSNY DGSLSPVWFQ ALEKVLNNLG |
| hrv-13 | AVGCDPETFW SKIPVMLDGD CIMAFDYTNY DGSIHPIWFE ALKQVLINLS |
| hrv-13-f03 | AVGCDPETFW SKIPVMLDGD CIMAFDYTNY DGSIHPIWFE ALKQVLRNLS |
| dq473493-15 | AVGCDPETFW SKIPVMLDGD CIMAFDYTNY DGSIHPIWFE ALKMILTNLH |
| l24917-16 | AVGCDPETFW SKIPLMLDGD CIMAFDYTNY DGSIHPIWFK ALGMVLDNLS |
| hrv-18 | AVGCDPETFW SKIPVMLDGE CIMAFDYTNY DGSIHPIWFQ ALKEVLSNLG |
| hrv-19 | AVGCDPEVFW SKIPVMLDGD CIMAFDYTNY DGSIHPVWFE ALKMILENLQ |
| hrv-20 | AVGCDPEVFW SKIPVMLDGD CLMAFDYTNY DGSLNPVWFK LLSIVLNDLG |
| hrv-21 | AVGCDPEVFW SKIPVMLDGD CIMAFDYTNY DGSIHPIWFQ ALKQVLTNLS |
| hrv-22 | AVGCDPETFW SKIPVMLDGD CIMAFDYTNY DGSIHPMWFE ALKMILHNLE |
| dq473497-23 | AVGCDPETFW SKIPAMLDDK CIMAFDYTNY DGSIHPIWFE ALKQVLTDLS |
| hrv-24 | AVGCDPETFW SKIPVMLDGE CIMAFDYTNY DGSIHPIWFQ ALKEVLSNLG |
| ef173416-24 | AVGCDPETFW SKIPVMLDGE CIMAFDYTNY DGSIHPIWFQ ALKEVLSNLG |
| hrv-25 | AVGCDPETFW SKIPVMLDGE CIMAFDYTNY DGSIHPIWFQ ALKEVLINLS |
| dq473508-28 | AVGCDPEVFW SKVPVMLDGE CLMAFDYTNY DGSLNPVWFK LLNKVLTDLG |
| hrv-29 | AVGCDPETFW SKIPVMLDGE CIMAFDYTNY DGSIHPIWFQ ALKEVLANLS |
| dq473512-30 | AVGCDPETFW SKIPAMLDDK CIMAFDYTNY DGSIHPIWFE ALKLVLSDLS |
| hrv-30 | AVGCDPETFW SKIPAMLDDK CIMAFDYTNY DGSIHPIWFE ALKLVLSDLS |
| hrv-31 | AVGCDPETFW SKIPVMLNGE CIMAFDYTNY DGSIHPIWFE ALKEVLSNLG |
| hrv-32 | AVGCDPETFW SKIPVMLDGD CIMAFDYTNY DGSIHPVWFE ALKEILKDLQ |
| hrv-33 | AVGCDPETFW SKIPVMLDGE CIMAFDYTNY DGSIHPVWFD ALKLVLANLS |
| hrv-34 | AVGCDPETFW SKIPVMLDGD CIMAFDYTNY DGSIHPIWFQ ALKEVLGNLS |
| dq473501-34 | AVDCDPETFW SKIPVMLDGD CIMAFDYTNY DGSIHPIWFQ ALKEVLGNLS |
| dq473505-36 | AVGCDPEIFW STIPLMLDGE CLMAFDYSNY DGSLHPVWFK CLSMLLEDIG |
| hrv-38 | AVGCDPETFW SKIPVMLDGE CIMAFDYTNY DGSIHPIWFQ ALKEVLSNLG |
| dq473495-38 | AVGCDPETFW TKIPVMLDGE CIMAFDYTNY DGSIHPIWFQ ALKEVLSNLG |
| ay751783-39 | AVGCDPETFW SKIPAMLDDK CIMAFDYTNY DGSIHPVWFQ ALKQVLSDLS |
| hrv-40 | AVGCDPETFW SKIPVMLDGE CIMAFDYTNY DGSIHPIWFQ ALKAVLSNLG |
| dq473491-41 | AVGCDPETFW SKIPVMLDGE CIMAFDYTNY DGSIHPVWFE ALKQVLANLS |
| hrv-43 | AVGCDPETFW SKIPVMLDGE CIMAFDYTNY DGSIHPVWFQ ALKSVLENLQ |
| dq473499-44 | AVGCDPETFW SKIPVMLDGE CIMAFDYTNY DGSIHPIWFQ ALKEVLANLS |
| hrv-45 | AVGCDPETFW SKIPPMLGDG CVMAFDYTNY DGSLHPIWFR LLERVLDRLG |
| dq473506-46 | AVGCDPEIFW SKIPVMLDGD CLMAFDYSNY DGSLNPVWFE LLEKVLNDLG |
| hrv-47 | AVGCDPETFW SKIPVMLDGE CIMAFDYTNY DGSIHPIWFE ALKEVLSNLG |
| dq473496-49 | AVGCDPETFW SKIPAMLDDK CIMAFDYTNY DGSIHPIWFE ALKQVLMDLS |
| hrv-49-f04 | AVGCDPEIFW SKIPAMLDDK CIMAFDYTNY DGSIHPIWFE ALKQVLMDLS |
| hrv-50 | AVGCDPETFW SKIPVMLDGE CIMAFDYTNY DGSIHPIWFQ ALKEVLNNLS |
| hrv-51 | AVGCDPEVFW SKIPVMLDGE CLMAFDYSNY DGSLNPVWFE LLAKVLDDLG |
| dq473507-53 | AVGCDPEVFW SKIPVMLDGD CLMAFDYSNY DGSLNPVWFE LLERVLNDLG |
| hrv-54 | AVGCDPETFW SKIPVMLDGE CIMAFDYTNY DGSIHPIWFQ ALKEVLSNLG |
| hrv-54-f05 | AVGCDPETFW SKIPVMLDGE CIMAFDYTNY DGSIHPIWFQ ALKEVLSNLG |
| dq473511-55 | AVGCDPEVFW SKIPVMLDGD CIMAFDYTNY DGSIHPIWFQ ALKEVLTNLS |
| hrv-56 | AVGCDPETFW SKIPVMLDGE CIMAFDYTNY DGSIHPMWFQ ALKEVLSNLS |
| hrv-57 | AVGCDPEVFW SKIPVMLDGD CIMAFDYTNY DGSIHPIWFQ ALKEVLVNLS |
| hrv-58 | AVGCDPEVFW STIPLMLDGE CLMAFDYSNY DGSLHPVWFK CLSMLLEDIG |
| dq473500-59 | GVGCDPETFW SKIPVMLDGE CIMAFDYTNY DGSIHPVWFQ ALKLVLENLG |
| hrv-60 | AVGCDPEIFW SKIPAMLNGE CLMAFDYTNY DGSIHPMWFQ ALKEILSNLG |
| hrv-61 | AVGCDPETFW SKIPVMLDGE CIMAFDYTNY DGSIHPIWFE ALKQVLINLS |
| hrv-62 | AVGCDPETFW SKIPVMLDGE CIMAFDYTNY DGSIHPIWFQ ALKEVLINLS |
| hrv-63 | AVGCDPETFW SKIPVMLDGE CIMAFDYTNY DGSIHPMWFQ ALKEVLSNLS |
| hrv-64 | AVGCDPETFW SKIPVMLDGE CIMAFDYTNY DGSIHPMWFE ALKMILHNLE |
| ef173417-64 | AVGCDPETFW SKIPVMLDGE CIMAFDYTNY DGSIHPMWFE ALKMILHNLE |
| hrv-65 | AVGCDPETFW SKIPVMLDGE CLMAFDYSNY DGSLNPVWFK LLAQILENLG |
| hrv-66 | AVGCDPETFW SKIPVMLDGE CIMAFDYTNY DGSIHPIWFQ ALKEVLSNLN |
| hrv-67 | AVGCDPETFW SKIPVMLDGD CIMAFDYTNY DGSIHPVWFD ALKEVLKDLQ |
| hrv-68 | AVGCDPEVFW SKVPVMLDGE CLMAFDYTNY DGSLNPVWFK LLNRVLTELG |
| hrv-71 | AVGCDPEVFW SKIPVMLDGE CLMAFDYSNY DGSLNPVWFK LLAGILSDLG |
| dq473492-73 | AVGCDPETFW SKIPVMLDGE CIMAFDYTNY DGSIHPIWFE ALKQVLNNLS |
| dq473494-74 | AVGCDPETFW SKIPVMLDGD CIMAFDYTNY DGSIHPVWFE ALKMVLTNLQ |
| dq473510-75 | AVGCDPETFW SKIPVMLDGD CIMAFDYTNY DGSIHPIWFE ALKQVLNNLS |
| dq473502-76 | AVGCDPETFW SKIPVMLDGE CIMAFDYTNY DGSIHPIWFD ALKLVLSNPS |
| hrv-76 | AVGCDPETFW SKIPVMLDGE CIMAFDYTNY DGSIHPIWFD ALKLVLSNLS |
| hrv-77 | AVGCDPETFW SKIPAMLDDE CIMAFDYTNY DGSIHPVWFQ ALKEILSNLG |
| hrv-78 | AVGCDPDTFW SKIPLMLDGE CLMAFDYSNY DGSLNPVWFQ ALKEILQNLG |
| ef173418-78 | AVGCDPDTFW SKIPLMLDGE CLMAFDYSNY DGSLNPVWFQ ALKEILQNLG |
| hrv-80 | AVGCDPETFW SKIPVMLDGD CLMAFDYSNY DGSLNPVWFK LLEGVLNELG |
| hrv-81 | AVGCDPETFW SKIPLMLDGD CIMAFDYTNY DGSIHPVWFK ALRMVLDNLS |
| hrv-81-f06 | AVGCDPETFW SKIPLMLDGD CIMAFDYTNY DGSIHPVWFK ALRMVLDNLS |
| hrv-81-f07 | AVGCDPETFW SKIPLMLDGD CIMAFDYTNY DGSIHPVWFK ALRMVLDNLS |
| hrv-82 | AVGCDPETFW SKIPVMLDGE CIMAFDYTNY DGSIHPMWFE ALKMVLNNLQ |
| dq473509-82 | AVGCDPETFW SKIPVMLDGE CIMAFDYTNY DGSIHPMWFE ALKMVLSNLQ |
| hrv-85 | AVGCDPETFW SKIPVMLDGE CIMAFDYTNY DGSIHPIWFQ ALKEVLSNLG |
| pico-85 | AVGCDPETFW SKIPVMLDGE CIMAFDYTNY DGSIHPIWFQ ALKEVLSNLG |
| dq473504-88 | AVGCDPEVFW STIPLMLDGE CLMAFDYSNY DGSLNPIWFK CLKMLLEDIG |
| a10937-89 | AVGCDPEVFW STIPLMLDGE CLMAFDYSNY DGSLHPVWFK CLSMLLEDIG |
| hrv-89 | AVGCDPEVFW STIPLMLDGE CLMAFDYSNY DGSLHPVWFK CLSMLLEDIG |
| hrv-89-f08 | AVGCDPEVFW STIPLMLDGE CLMAFDYSNY DGSLHPVWFK CLSMLLEDIG |
| hrv-89-f09 | AVGCDPEVFW STIPLMLDGE CLMAFDYSNY DGSLHPVWFK CLSMLLEDIG |
| m16248-89 | AVGCDPEVFW STIPLMLDGE CLMAFDYSNY DGSLHPVWFK CLSMLLEDIG |
| hrv-90 | AVGCDPETFW SKIPVMLDGE CIMAFDYTNY DGSIHPIWFQ ALKEVLTNLG |
| hrv-94 | AVGCDPETFW SKIPVMLDGE CIMAFDYTNY DGSIHPMWFE ALKMILHNLE |
| ef173419-94 | AVGCDPETFW SKIPVMLDGE CIMAFDYTNY DGSIHPMWFE ALKMILHNLE |
| hrv-95 | AVGCDPEVFW SKIPPMLGDG SVMAFDYTNY DGSLHPVWFK MLEVVLDRLG |
| hrv-96 | AVGCDPETFW SKIPVMLDGE CIMAFDYTNY DGSIHPVWFE ALKQVLLNLS |
| hrv-98 | AVGCDPETFW SKIPVMLDGE CIMAFDYTNY DGSIHPVWFQ ALKEVLSNLG |
| hrv-100 | AVGCDPETFW SKIPVMLDGE CIMAFDYTNY DGSIHPIWFQ ALKEVLTNLS |
| ef186077-qpm | AIGCDPDIFW SQLYASMEKH .LLVFDYTNY DGSLHPVWFQ ALEQLLNNLG |
| ef077279-nat001 | AIGCDPDIFW SQLYASMEKH .LLVFDYTNY DGSLHPVWFQ ALEQLLNNLG |
| ny1078 | AIGCDPDIFW SQLYSSMEKH .LLVFDYTNY DGSLHPVWFQ ALEQLLNNLG |
| ef582385-c024 | AVGCNPDVFW SQMHAMLDGE .LIAFDYTNY DGSLEPVWFK ALGKVLDQLG |
| ef077280-nat045 | AVGCDPDIFW SQLHASLGGH .LLAFDYTNY DGSLHPIWFL CLEKVLTNLG |
| ef582387-c026 | AIGCDPDVFW SQLYASMEKH .LLVFDYTNY DGSLHPVWFQ ALEQLLNNLG |
| ef582386-c025 | AVGCDPDVFW SQMKATMGEN .ILAFDYTNY DGSLDPIWFD ALKIVLNELG |
| dq473485-03 | AVGCDPDVFW SVIPCLMDGH .LMAFDYSNF DASLSPVWFE CLEKVLNKLG |
| ef173422-03 | AVGCDPDVFW SVIPCLMDGH .LMAFDYSNF DASLSPVWFE CLEKVLNKLG |
| dq473490-04 | AVGCDPDTFW SVIPCLLDGE .LIAFDYSNF DASLSPVWFN CLEIVLEKLG |
| hrv-05 | AVGCDPDTFW SVIPCLLDGE .LIAFDYSNF DASLSPVWFK CLEQVLKKIG |
| dq473486-06 | AVGCDPDVFW SIIPCLMDGH .LMAFDYSNF DASLSPVWFE CLERVLAKLG |
| l05355-14 | AVGCDPDVFW SVIPCLMDGH .LMAFDYSNF DASLSPVWFV CLEKVLTKLG |
| k02121-14 | AVGCDPDVFW SVIPCLMDGH .LMAFDYSNF DASLSPVWFV CLEKVLTKLG |
| ef173420-17 | AVGCDPDTFW SIIPCLMDGQ .LMAFDYSNF DASLSPVWFK CLEQVLSKLG |
| hrv-26 | AVGCDPDTFW SVIPCLLDGE .LIAFDYSNF DASLSPVWFK CLENVLRKIG |
| hrv-27 | AVGCDPDTFW SIIPNLLDGE .LLAFDYSNF DASLSPVWFD CLELVLRKLG |
| ef173421-27 | AVGCDPDTFW SIIPNLLDGE .LLAFDYSNF DASLSPVWFD CLELVLRKLG |
| dq473487-35 | AVGCDPDTFW SVIPCLMDGH .LMAFDYSNF DASLSPVWFT CLERVLLKLG |
| hrv-35 | AVGCDPDTFW SVIPCLMDGH .LMAFDYSNF DASLSPVWFT CLERVLLKLG |
| ef173423-37 | AVGCDPDTFW SIIPCLMDGH .LMAFDYSNF DASLSPVWFE CLEKVLIKLG |
| hrv-42 | AVGCDPDTFW SVIPCLLDGE .LIAFDYSNF DASLSPVWFE CLEQVLKKIG |
| dq473488-48 | AVGCDPDTFW SVIPCLMDGQ .LMAFDYSNF DASLSPVWFN CLEQVLIKLG |
| hrv-52 | AVGCDPDTFW SVIPCLMDGQ .LMAFDYSNF DASLSPVWFR CLEQVLAKLG |
| hrv-52-f10 | AVGCDPDTFW SVIPCLMDGQ .LMAFDYSNF DASLSPVWFK CLEQVLAKLG |
| ef173424-52 | AVGCDPDTFW SVIPCLMDGQ .LMAFDYSNF DASLSPVWFR CLEQVLAKLG |
| hrv-69 | AVGCDPDTFW SVIPCLMDGQ .LMAFDYSNF DASLSPVWFK CLEQVLTKLG |
| dq473489-70 | AVGCDPDTFW SIIPCLMDGQ .LMAFDYSNF DASLSPVWFK CLEQVLSRLG |
| hrv-72 | AVGCDPDVFW SVIPCLMDGH .LMAFDYSNF DASLSPVWFV CLEKVLYKLG |
| hrv-79 | AVGCDPDVFW SVIPCLMDGH .LMAFDYSNF DASLSPVWFE CLEKVLEKLG |
| hrv-83 | AVGCDPDVFW SVIPCLMDGH .LMAFDYSNF DASLSPVWFE CLERVLEKIG |
| hrv-84 | AVGCDPDVFW SVIPCLLDGE .LLAFDYSNF DASLSPIWFD CLELVLRKIG |
| hrv-86 | AVGCDPDVFW SVIPCLMEGH .LMAFDYSNF DASLSPVWFD CLEKVLEKLG |
| hrv-91 | AVGCDPDTFW SIIPCLMDGQ .LMAFDYSNF DASLSPVWFK CLEQVLSKLG |
| hrv-92 | AVGCDPDVFW SVIPCLMDGH .LMAFDYSNF DASLSPVWFE CLERVLSKIG |
| ef173425-93 | AVGCDPDTFW SIIPSLLDGE .LLAFDYSNF DASLSPVWFE CLELVLRKLG |
| hrv-97 | AVGCDPDTFW SVIPSLLDGE .LLAFDYSNF DASLSPVWFD CLEMVLKKLG |
| hrv-99 | AVGCDPDTFW SIIPCLLDGE .LIAFDYSNF DASLSPVWFE CLEKVLSKIG |
| | 2051 2100 |
| annotation | HHHHHHHHHH HHHBBBBB.. BBBBBB.... ....HHHHHH HHHHHHHHHH |
| af499637-cva13 | FGDRVDYIDY LNHSHHLYKN KTYCVKGGMP SGCSGTSIFN SMINNLIIRT |
| af546702-cva21 | FGSRVDYIDY LNHSHHLYKN KTYCVKGGMP SGCSGTSIFN SMINNLIIRT |
| v01149-pv1m | FGDRVDYIDY LNHSHHLYKN KTYCVKGGMP SGCSGTSIFN SMINNLIIRT |
| d00239-01 | FQ..SNLIDR LCYSKHLFKS TYYEVAGGVP SGCSGTSIFN TMINNIIIRT |
| pico-01 | FQ..SNLIDR LCYSKHLFKS TYYEVAGGVP SGCSGTSIFN TMINNIIIRT |
| hrv-01 | FQ..SNLIDR LCYSKHLFKS TYYEVAGGVP SGCSGTSIFN TMINNIIIRT |
| x02316-02 | FN..PTLIDR LCKSKHIFKN TYYEVEGGVP SGCSGTSIFN TMINNIIIRT |
| hrv-07 | FS..SQLIDQ ICNSKHIYKS KYYEVEGGMP SGCAGTSIFN TMINNIIIRV |
| dq473503-07 | FS..SQLIDQ ICNSKHIYKS KYYEVEGGMP SGCAGTSIFN TMINNIIIRV |
| hrv-08 | FP..GCAIRK LSHSAHIYKG TYYEVDGGMP SGCAGTSIFN SMINNIIIRT |
| pico-09 | FE..HRLIDR LCNSRHIFKD SYYEVEGGVP SGCSGTSIFN TMINNVIIRT |
| hrv-09 | FE..HRLIDR LCNSRHIFRD SYYEVEGGVP SGCSGTSIFN TMINNVIIRT |
| hrv-09-f01 | FE..HRLIDR LCNSRHIFRD TYYEVEGGVP SGCSGTSIFN TMINNVIIRT |
| hrv-09-f02 | FE..HRLIDR LCNSRHIFRD TYYEVEGGVP SGCSGTSIFN TMINNVIIRT |
| dq473498-10 | FE..ASLIDR LCKSKHIFKN MYYEVEGGVP SGCSGTSIFN TMINNIIIRT |
| hrv-10 | FE..ASLIDR LCKSKHIFKN MYYEVEGGVP SGCSGTSIFN TMINNIIIRT |
| ef173414-11 | FR..TDLIDR LCKSKHIFKG TYYEVEGGVP SGCSGTSIFN TMINNVIIRT |
| ef173415-12 | FP..GHLVQN LCSSKHIFRS KYYEVDGGMP SGCSGTSIFN SMINNIIIRT |
| hrv-13 | FE..DKLIDR LCRSKHIFRD TYYEVEGGVP SGCSGTSIFN TMINNIIIRT |
| hrv-13-f03 | FE..DKLIDR LCKSKHIFRD TYYEVEGGVP SGCSGTSIFN TMINNIIIRT |
| dq473493-15 | FE..PSLIDR LCNSKHIFKD TYYEVEGGVP SGCSGTSIFN TMINNVIIRT |
| l24917-16 | FN..PTLINR LCNSKHIFKS TYYEVEGGVP SGCSGTSIFN SMINNIIIRT |
| hrv-18 | FN..PNLIDR LCKSKHIFKN IYYEVEGGVP SGCSGTSIFN TMINNIIIRT |
| hrv-19 | FE..PKLIDR LCNSKHIYRD SYYEVEGGVP SGCSGTSIFN TMINNVIIRT |
| hrv-20 | FP..GELVNK LCNSKHIYKT TYYEVEGGMP SGCAGTSIFN TIINNIIIRT |
| hrv-21 | FE..ASLIDR LCKSKHIFKN IYYEVEGGVP SGCSGTSIFN TMINNVIIRT |
| hrv-22 | FE..PKLIDR LCNSKHIYRD SYYEVEGGVP SGCSGTSIFN TMINNVIIRT |
| dq473497-23 | FN..PMLIDR LCRSKHIFKN TYYEVEGGVP SGCSGTSIFN TMINNIIIRT |
| hrv-24 | FE..SSLIDR LCKSKHIFKN MYYEVEGGVP SGCSGTSIFN TMINNIIIRT |
| ef173416-24 | FE..SSLIDR LCKSKHIFKN MYYEVEGGVP SGCSGTSIFN TMINNIIIRT |
| hrv-25 | FE..PTLIDR LCRSKHIFKN TYYEVEGGVP SGCSGTSIFN TMINNIIIRT |
| dq473508-28 | FP..GDLVNK LCNSRHIYKT TYYEAEGGMP SGCAGTSIFN TIINNIIIRT |
| hrv-29 | FE..PALIDR LCRSKHIFKN TYYEVEGGIP SGCSGTSIFN TMINNVIIRT |
| dq473512-30 | FN..PMLIDR LCKSKHIFKN TYYEVEGGVP SGCSGTSIFN TMINNIIIRT |
| hrv-30 | FE..PMLIDR LCKSKHIFKN TYYEVEGGVP SGCSGTSIFN TMINNIIIRT |
| hrv-31 | FQ..SDLIDR LCRSKHIFKN VYYEVEGGVP SGCSGTSIFN TMINNIIIRT |
| hrv-32 | FE..HRLIDR LCNSKHIFKD SYYEVEGGVP SGCSGTSIFN TMINNVIIRT |
| hrv-33 | FR..TDLIDR LCKSKHIFKG TYYEVEGGVP SGCSGTSIFN TMINNVIIRT |
| hrv-34 | FE..ANLIDR LCNSKHIFKN VYYEVEGGVP SGCSGTSIFN TMINNIIIRT |
| dq473501-34 | FE..ANLIDR LCNSKHIFKN VYYEVEGGVP SGCSGTSIFN TMINNIIIRT |
| dq473505-36 | FS..SQLINQ ICNSKHIYKS KYYEVEGGMP SGCAGTSIFN TMINNIIIRT |
| hrv-38 | FQ..PNLIDR LCKSKHIFKN TYYEVEGGVP SGCSGTSIFN TMINNVIIRT |
| dq473495-38 | FQ..PNLIDR LCKSKHIFKN TYYEVEGGVP SGCSGTSIFN TMINNVIIRT |
| ay751783-39 | FD..PSLIDR LCKSKHIFRN TYYEVEGGVP SGCSGTSIFN TMMNNIIIRT |
| hrv-40 | FN..SNLIDR LCRSKHIFKN VYYEVEGGVP SGCSGTSIFN TMINNIIIRT |
| dq473491-41 | FE..DRLIDR LCKSKHIFRD TYYEVEGGVP SGCSGTSIFN TMINNIIIRT |
| hrv-43 | FE..PKLVDR LCNSKHIYRD SYYEVEGGVP SGCSGTSIFN TMINNVIIRT |
| dq473499-44 | FE..PALIDR LCRSKHIFKN TYYEVEGGIP SGCSGTSIFN TMINNVIIRT |
| hrv-45 | FP..GCAVRK LSHSTHIYKG MYYEVDGGMP SGCAGTSIFN SMINNIIIRT |
| dq473506-46 | FP..GKLVNK LCHSKHIYKT TYYEVEGGMP SGCAGTSIFN SMINNIIIRT |
| hrv-47 | FK..PNLIDR LCRSKHIFKN VYYEVEGGVP SGCSGTSIFN TMINNVIIRA |
| dq473496-49 | FD..PMLIDR LCKSKHIFRN TYYEVEGGVP SGCSGTSIFN TMINNIIIRT |
| hrv-49-f04 | FD..PMLIDR LCKSKHIFRN TYYEVEGGVP SGCSGTSIFN TMINNIIIRT |
| hrv-50 | FE..ASLIDR LCNSKHIFKN MYYEVEGGVP SGCSGTSIFN TMINNVIIRT |
| hrv-51 | FP..GNLVRK LCYSKHIFKT QYYEVEGGMP SGCAGTSIFN TIINNIIIRT |
| dq473507-53 | FP..GKLVNK LCHSKHIYKT TYYEVEGGMP SGCAGTSIFN SMINNIIIRT |
| hrv-54 | FQ..SNLIDR LCKSKHIFKN VYYEVEGGVP SGCSGTSIFN TMINNIIIRT |
| hrv-54-f05 | FQ..PNLIDR LCKSKHIFKN VYYEVEGGVP SGCSGTSIFN TMINNIIIRT |
| dq473511-55 | FE..ANLIDR LCRSKHIFKS VYYEVEGGVP SGCSGTSIFN TMINNIIIRT |
| hrv-56 | FE..ASLIDR LCKSKHIFKN MYYEVEGGVP SGCSGTSIFN TMINNIIIRT |
| hrv-57 | FE..ANLIDR LCKSKHIFKN VYYEVEGGVP SGCSGTSIFN TMINNIIIRT |
| hrv-58 | FS..SQLINQ ICNSKHIYKS KYYEVEGGMP SGCAGTSIFN TIINNIIIRT |
| dq473500-59 | FE..SGLIDR LCKSKHIFKN IYYEVEGGVP SGCSGTSIFN TMINNIIIRT |
| hrv-60 | FQ..PDLIDR LCKSKHIFKN IYYEVEGGVP SGCSGTSIFN TMINNVIIRT |
| hrv-61 | FE..HRLIDR LCKSKHIFKD TYYEVEGGVP SGCSGTSIFN TMINNVIIRT |
| hrv-62 | FE..PTLIDR LCRSKHIFKN TYYEVEGGVP SGCSGTSIFN TMINNIIIRT |
| hrv-63 | FE..ASLIDR LCNSKHIFKN MYYEVEGGVP SGCSGTSIFN TMINNIIIRT |
| hrv-64 | FE..PKLIDR LCNSKHIYRD SYYEVEGGVP SGCSGTSIFN TMINNIIIRT |
| ef173417-64 | FE..PKLIDR LCNSKHIYRD SYYEVEGGVP SGCSGTSIFN TMINNIIIRT |
| hrv-65 | FP..GNLVQK LCYSKHIFKT QYYEVEGGMP SGCAGTSIFN TMINNVIIRT |
| hrv-66 | FE..PNLIDR LCKSKHIFKN MYYEVEGGVP SGCSGTSIFN TMINNIIIRT |
| hrv-67 | FE..HRLIDR LCNSKHIFKD SYYEVEGGVP SGCSGTSVFN TMINNIIIRT |
| hrv-68 | FP..GDLVNK LCNSKHIYKT IYYEVEGGMP SGCAGTSIFN TIINNIIIRT |
| hrv-71 | FP..GDLVQK LCYSKHIFKT KYYEVEGGMP SGCAGTSIFN TMINNVIIRT |
| dq473492-73 | FE..DKLIDR LCRSKHIFRD TYYEVEGGVP SGCSGTSIFN TMINNIIIRT |
| dq473494-74 | FE..SGLIDR LCKSKHIFRD SYYEVEGGVP SGCSGTSIFN TMINNVIIRT |
| dq473510-75 | FD..SKLIDR LCNSKHIFKN SYYEVEGGIP SGCSGTSIFN TMINNIIIRT |
| dq473502-76 | FR..TDLIDR LCKSKHIFKG TYYEVEGGVP SGCSGTSIFN TMINNVIIRT |
| hrv-76 | FR..TDLIDR LCKSKHIFKG TYYEVEGGVP SGCSGTSIFN TMINNVIIRT |
| hrv-77 | FE..PGLIDR LCKSKHIFKN TYYEVEGGVP SGCSGTSIFN TMINNVIIRT |
| hrv-78 | FE..SKLIDR LCNSKHIFSS QYYEVEGGMP SGCAGTSIFN TMINNVIIRT |
| ef173418-78 | FE..SKLIDR LCNSKHIFSS QYYEVEGGMP SGCAGTSIFN TMINNVIIRT |
| hrv-80 | FQ..GDLVRK LCYSKHVYKA SYYEVEGGMP SGCAGTSIFN TMINNIIIRT |
| hrv-81 | FN..SALIDK LCNSKHIFKS TYYEVEGGVP SGCSGTSIFN SMINNIIIRT |
| hrv-81-f06 | FN..STLIDK LCNSKHIFKS TYYEVEGGVP SGCSGTSIFN SMINNIIIRT |
| hrv-81-f07 | FN..STLIDK LCNSKHIFKS TYYEVEGGVP SGCSGTSIFN SMINNIIIRT |
| hrv-82 | FE..SRLIDR LCNSKHIYKD SYYEVEGGVP SGCSGTSIFN TMINNVIIRT |
| dq473509-82 | FE..PRLIDR LCNSKHIYKD SYYEVEGGVP SGCSGTSIFN TMINNVIIRT |
| hrv-85 | FD..SNLIDR ICKSKHIFKN MYYEVEGGVP SGCSGTSIFN TMINNIIIRT |
| pico-85 | FD..SNLIDR ICKSKHIFKN MYYEVEGGVP SGCSGTSIFN TMINNIIIRT |
| dq473504-88 | FP..SQLIDQ ICNSKHIYKS KYYEVEGGMP SGCAGTSIFN TIINNIIIRT |
| a10937-89 | FS..SQLINQ ICNSKHIYKS KYYEVEGGMP SGCAGTSIFN TIINNIIIRT |
| hrv-89 | FS..SQLINQ ICNSKHIYKS KYYEVEGGMP SGCAGTSIFN TIINNIIIRT |
| hrv-89-f08 | FP..SQLINQ ICNSKHIYKS KYYEVEGGMP SGCAGTSIFN TIINNIIIRT |
| hrv-89-f09 | FS..SQLINQ ICNSKHIYKS KYYEVEGGMP SGCAGTSIFN TIINNIIIRT |
| m16248-89 | FS..SQLINQ ICNSKHIYKS KYYEVEGGMP SGCAGTSIFN TIINNIIIRT |
| hrv-90 | FE..SNLIDR LCRSKHIFKN MYYEVEGGVP SGCSGTSIFN TMINNVIIRT |
| hrv-94 | FE..PKLIDR LCNSKHIYRD SYYEVEGGVP SGCSGTSIFN TMINNVIIRT |
| ef173419-94 | FE..PKLIDR LCNSKHIYRD SYYEVEGGVP SGCSGTSIFN TMINNVIIRT |
| hrv-95 | FP..GCAVRK LSHSAHIYKG TYYEVDGGMP SGCAGTSIFN SMINNIIIRT |
| hrv-96 | FE..HRLIDR LCNSKHIFKD TYYEVEGGIP SGCSGTSIFN TMINNVIIRT |
| hrv-98 | FQ..PNLIDR LCKSKHIFKN VYYEVEGGVP SGCSGTSIFN TMINNVIIRT |
| hrv-100 | FD..ASLIDR LCKSKHIFKN MYYEVEGGVP SGCSGTSIFN TMINNIIIRT |
| ef186077-qpm | FP..GELAYK LCNTTHIYKD EIYTVKGGMP SGISGTSIFN TIINNIIIRT |
| ef077279-nat001 | LP..GELAYK LCNTTHIYKD EIYTVKGGMP SGISGTSIFN TIINNIIIRT |
| ny1078 | FP..GELAYK LCNTTHIYKD EMYSVKGGMP SGISGTSIFN TIINNIIIRT |
| ef582385-c024 | FP..GHLTQR LCNTTHIFRD TTYDVKGGMP SGISGTSIFN TMMNNIIIRT |
| ef077280-nat045 | FP..GELMGK LSNSKHIYKN AFYTTEGGMP SGICGTSIFN TMINNVIIRT |
| ef582387-c026 | FP..GELAYK LCNTTHIYKD EIYTVKGGMP SGISGTSIFN TIINNIIIRT |
| ef582386-c025 | FD..GELTEK LKKTTHVYKD EVYTVLGGMP SGTSGTSVFN TMINNIIIRT |
| dq473485-03 | FK.QPSLIQS ICNTHHIFRD EIYRVEGGMP SGCSGTSIFN SMINNIIIRT |
| ef173422-03 | FK.HPSLIQS ICNTHHIFRD EIYRVEGGMP SGCSGTSIFN SMINNIIIRT |
| dq473490-04 | FQ.CSNLIQQ ICTTHHIFRD QIYVVEGGMP SGCSGTSIFN SMINNIIIRT |
| hrv-05 | FQ.CSELIQQ ICTTHHIFKD QIYTVEGGMP SGCSGTSIFN SMINNIIIRT |
| dq473486-06 | FK.HSSLIQT ICHTHHISKD EIYIVEGGMP SGCSGTSIFN SMINNIIIRT |
| l05355-14 | FA.GSSLIQS ICNTHHIFRD EIYVVEGGMP SGCSGTSIFN SMINNIIIRT |
| k02121-14 | FA.GSSLIQS ICNTHHIFRD EIYVVEGGMP SGCSGTSIFN SMINNIIIRT |
| ef173420-17 | FK.HSNLIQT ICNTHHIFRD EIYEVEGGMP SGCSGTSVFN SMINNIIIRT |
| hrv-26 | FQ.CADMIQQ ICTTHHIFKD QIYVVEGGMP SGCSGTSIFN SMINNIIIRT |
| hrv-27 | FE.SADLVKK ISTTHHIFKD QIYVVEGGMP SGCSGTSIFN SMINNIIIRT |
| ef173421-27 | FE.SADLVKK ISTTHHIFKD QIYVVEGGMP SGCSGTSIFN SMINNIIIRT |
| dq473487-35 | FE.HSNLIQT ICNTHHIFKD EIYTVKGGMP SGCSGTSIFN SMINNIIIRT |
| hrv-35 | FE.HSNLIQT ICNTHHIFKD EIYTVKGGMP SGCSGTSIFN SMINNIIIRT |
| ef173423-37 | FK.HSSLIQS ICHTHHIFKD EIYIVEGGMP SGCSGTSIFN SMINNIIIRT |
| hrv-42 | FQ.CSELIQQ ICTTHHIFKD QIYVVEGGMP SGCSGTSIFN SMINNIIIRT |
| dq473488-48 | FK.HANLIKS ICNTHHIFRD QIYEVEGGMP SGCSGTSIFN SMINNIIIRT |
| hrv-52 | FR.HSNLIKT ICNTHHIFRD EIYEVEGGMP SGCSGTSVFN SMINNIIIRT |
| hrv-52-f10 | FK.HSNLIRT ICNTHHIFRD EIYEVEGGMP SGCSGTSVFN SMINNIIIRT |
| ef173424-52 | FR.HSNLIKT ICNTHHIFRD EIYEVEGGMP SGCSGTSVFN SMINNIIIRT |
| hrv-69 | FK.HSNLIKT ICNTHHIFRD EIYEVEGGMP SGCSGTSVFN SMINNIIIRT |
| dq473489-70 | FR.HSNLIQT ICNTHHIFRD EIYEVEGGMP SGCSGTSVFN SMINNIIIRT |
| hrv-72 | FK.HSSLIQS ICNTHHIFRD EIYVVEGGMP SGCSGTSIFN SMINNIIIRT |
| hrv-79 | FK.CASLIQT ICNTHHIFKD EIYTVKGGMP SGCSGTSIFN SMINNIIIRT |
| hrv-83 | FS.CASLIQT ICNTHHIFKD EIYTVKGGMP SGCSGTSIFN SMINNIIIRT |
| hrv-84 | FE.SANLIKQ ICTTHHIFRD QVYVVEGGMP SGCSGTSIFN SMINNIIIRT |
| hrv-86 | FK.DSNLIRS ICNTHHIFRD EIYAVRGGMP SGCSGTSIFN SMINNIIIRT |
| hrv-91 | FK.HSNLIQT ICNTHHIFRD EIYEVEGGMP SGCSGTSIFN SMINNIIIRT |
| hrv-92 | FK.CASLIQT ICNTHHIFRD EIYTVKGGMP SGCSGTSIFN SMINNIIIRT |
| ef173425-93 | FE.SADLIRK ISTTHHIFKD QIYVVEGGMP SGCSGTSIFN SMINNIIIRT |
| hrv-97 | FE.SADLIKR ISTTHHIFKD QIYVVEGGMP SGCSGTSIFN SMINNIIIRT |
| hrv-99 | FQ.CSELIQQ ICTTHHIFRD QIYTVEGGMP SGCSGTSIFN SMINNIIIRT |
| | 2101 2150 |
| annotation | HHHHHH...H HHHHBBBBBG DDBBBBB... .HHHHHHHHH HHH...HHH. |
| af499637-cva13 | LLLKTYKGID LDHLKMIAYG DDVIASYPHE VDASLLAQSG KDYGLTMTPA |
| af546702-cva21 | LLLRTYKGID LDHLKMIAYG DDVIASYPHE VDASLLAQSG KDYGLTMTPA |
| v01149-pv1m | LLLKTYKGID LDHLKMIAYG DDVIASYPHE VDASLLAQSG KDYGLTMTPA |
| d00239-01 | LVLDAYKNID LDKLKIIAYG DDVIFSYKYT LDMEAIANEG KKYGLTITPA |
| pico-01 | LVLDAYKNID LDKLKIIAYG DDVIFSYKYT LDMEAIANEG KKYGLTITPA |
| hrv-01 | LVLDAYKNID LDKLKIIAYG DDVIFSYKYT LDMEAIANEG KKYGLTITPA |
| x02316-02 | LVLDAYKNID LDKLKIIAYG DDVIFSYIHE LDMEAIAIEG VKYGLTITPA |
| hrv-07 | LVLDAYKNID LDKLKILAYG DDVIFSYNFK LDMEILAREG DKYGLTITPA |
| dq473503-07 | LVLDAYKNID LDKLKILAYG DDVIFSYNFK LDMEILAREG DKYGLTITPA |
| hrv-08 | IILHGYKNID LDQLRILTYG DDIIFTYPDK LDMSYLAQIG EQYGLKMTPA |
| pico-09 | LVLDAYKHID LDKLKIIAYG DDVIFSYKYP LDMEAIAMEG KKYGLTITPA |
| hrv-09 | LVLDAYKHID LDKLKIIAYG DDVIFSYKYP LDMEAIAMEG KKYGLTITPA |
| hrv-09-f01 | LVLDAYKNID LDKLKIIAYG DDVIFSYKYP LDMEAIAMEG KKYGLTITPA |
| hrv-09-f02 | LVLDAYKNID LDKLKIIAYG DDVIFSYKYP LDMEAIAMEG KKYGLTITPA |
| dq473498-10 | LVLDAYKNID LDKLKIIAYG DDVIFSYKYQ LDMEAIAKEG TKYGLTITPA |
| hrv-10 | LVLDAYKNID LDKLKIIAYG DDVIFSYKYQ LDMEAIAKEG TKYGLTITPA |
| ef173414-11 | LVLDAYKNID LDKLKIIAYG DDVIFSYKYE LDMEAIAKEG VKYGLTITPA |
| ef173415-12 | LVLDTYKHIN LDKLKILSYG DDVLFSYPYE LSMEDIALAG QKYGLNITPA |
| hrv-13 | LVLDAYKHID LDKLKIIAYG DDVIFSYKYP LDMEAIAIEG NKYGLTITPA |
| hrv-13-f03 | LVLDAYKHID LDKLKIIAYG DDVIFSYKYP LDMEAIATEG NKYGLTITPA |
| dq473493-15 | LVLDAYKHID LDKLKIIAYG DDVIFSYKYN LDMEVIAAEG LKYGLTITPA |
| l24917-16 | LVLDAYKHID LDKLKIIAYG DDVIFSYKYK LDMEAIAKEG QKYGLTITPA |
| hrv-18 | LVLDAYKNID LDKLKIIAYG DDVIFSYKYQ LDMEAIAKEG TKYGLTITPA |
| hrv-19 | LVLDAYKHID LDKLKIIAYG DDVIFSYKYV LDMEAIAQEG TKYGLTITPA |
| hrv-20 | LVLDTYKFIN LDKLKILAYG DDVIFSYPFD LDMKELANEG TKYGLSITPA |
| hrv-21 | LVLDAYKNID LDKLKIIAYG DDVIFSYKYQ LDMEAIANEG TKYGLTITPA |
| hrv-22 | LVLDAYKHID LDKLKIIAYG DDVIFSYKYA LDMEAIASEG TKYGLTITPA |
| dq473497-23 | LVLDAYKNID LDKLKIIAYG DDVIFSYTYE LDMEAIAIEG VKYGLTITPA |
| hrv-24 | LVLDAYKNID LDKLKIIAYG DDVIFSYKYQ LDMEAIAKEG TKYGLTITPA |
| ef173416-24 | LVLDAYKNID LDKLKIIAYG DDVIFSYKYQ LDMEAIAKEG TKYGLTITPA |
| hrv-25 | LVLDAYRNID LDKLKILAYG DDVIFSYKYQ LDMEAIAKEG IKYGLTITPA |
| dq473508-28 | LVLDTYKFIN LDKLKILAYG DDVIFSYPYD LDMKELASEG TKYGLSITPA |
| hrv-29 | LVLDAYKNID LDKLKILAYG DDVIFSYKYQ LDMEAIAKEG TKYGLTITPA |
| dq473512-30 | LVLDAYKNID LDKLKIIAYG DDVIFSYIYE LDMEAIAMEG VKYGLTITPA |
| hrv-30 | LVLDAYKNID LDKLKIIAYG DDVIFSYIYE LDMEAIAMEG VKYGLTITPA |
| hrv-31 | LVLDAYKNID LDKLKIIAYG DDVIFSYKYQ LDMEVIAKEG IKYGLTITPA |
| hrv-32 | LVLDAYKHID LDKLKIIAYG DDVIFSYKYP LEMEAIAIEG KKYGLTITPA |
| hrv-33 | LVLDAYKNID LDKLKIIAYG DDVIFSYKYQ LDMEAIALEG VKYGLTITPA |
| hrv-34 | LVLDAYKNID LDKLKIIAYG DDVIFSYKYQ LDMEAIAMEG TKYGLTITPA |
| dq473501-34 | LVLDAYKNID LDKLKIIAYG DDVIFSYKYQ LDMEAIAMEG TKYGLTITPA |
| dq473505-36 | LVLDAYKNID LDKLKILAYG DDVIFSYNFK LDMTVLAKEG EKYGLTITPA |
| hrv-38 | LVLDAYKNID LDKLKIIAYG DDVIFSYKYQ LDMEAIANEG VKYGLTITPA |
| dq473495-38 | LVLDAYKNID LDKLKIIAYG DDVIFSYKYQ LDMEAIANEG VKYGLTITPA |
| ay751783-39 | LVLDAYKNID LDKLKIIAYG DDVIFSYVYE LDMEAIAMEG KKYGLTITPA |
| hrv-40 | LVLDAYKNID LDKLKIIAYG DDVIFSYKYQ LDMEAIAKEG SKYGLTITPA |
| dq473491-41 | LVLDAYKHID LDKLKIIAYG DDVIFSYKYP LDMEAIASEG IKYGLTITPA |
| hrv-43 | LVLDAYKHID LDKLKIIAYG DDVIFSYKYT LDMEAIANEG IKYGLTITPA |
| dq473499-44 | LVLDAYKNID LDKLKILAYG DDVIFSYKYQ LDMEAIAKEG TKYGLTITPA |
| hrv-45 | IILHAYKNID LDQLRILTYG DDIIFTYPDK LDMAYLAQIG EKYGLKMTPA |
| dq473506-46 | LVLDTYKHIN LDKLKILAYG DDVLFSYPFD LDMAELAKEG DKYGLTITPA |
| hrv-47 | LVLDAYKNID LDKLKIIAYG DDVIFSYKYQ LDMEAIAKEG IKYGLTITPA |
| dq473496-49 | LVLDAYKNID LDKLKIIAYG DDVIFSYTHE LDMEAIAIEG IKYGLTITPA |
| hrv-49-f04 | LVLDAYKNID LDKLKIIAYG DDVIFSYTYE LDMEAIAMEG TKYGLTITPA |
| hrv-50 | LVLDAYKNID LDKLKIIAYG DDVIFSYKYQ LDMEAIAKEG VKYGLTITPA |
| hrv-51 | LVLDTYKYVN LDKLKILAYG DDILFSYPYD LDMKELADEG SKYGLTITPA |
| dq473507-53 | LVLDTYKYIN LDKLKILAYG DDVLFSYPYD LDMAELAKEG NKYGLTITPA |
| hrv-54 | LVLDAYKNID LDKLKIIAYG DDVIFSYKYQ LDMEAIAKEG VKYGLTITPA |
| hrv-54-f05 | LVLDAYKNID LDKLKIIAYG DDVIFSYKYQ LDMEAIAKEG VKYGLTITPA |
| dq473511-55 | LVLDAYKYID LDKLKIIAYG DDVIFSYKYQ LDMEAIAKEG TKYGLTITPA |
| hrv-56 | LVLDAYKNID LDKLKIIAYG DDVLFSYKYQ LDMEAIANEG TKYGLTITPA |
| hrv-57 | LVLDAYKNID LDKLKIIAYG DDVIFSYKYQ LDMEAIAQEG VKYGLTITPA |
| hrv-58 | LVLDAYKNID LDKLKILAYG DDVIFSYNFK LDMAVLAKEG EKYGLTITPA |
| dq473500-59 | LVLDAYKNID LDKLKIIAYG DDVIFTYKYQ LDMEAIAAEG KKYGLTITPA |
| hrv-60 | LVLDAYKNID LDKLKIIAYG DDVIFSYIYQ LDMEAIAKEG SKYGLTITPA |
| hrv-61 | LVLDAYKYID LDKLKIIAYG DDVIFSYKYP LDMEAIAAEG NKYGLTITPA |
| hrv-62 | LVLDAYKNID LDKLKILAYG DDVIFSYKYQ LDMEAIAKEG IKYGLTITPA |
| hrv-63 | LVLDAYKNID LDKLKIIAYG DDVIFSYKYQ LDMEAIAKEG TKYGLTITPA |
| hrv-64 | LVLDAYKHID LDKLKIIAYG DDVIFSYKYA LDMEAIALEG VKYGLTITPA |
| ef173417-64 | LVLDAYKHID LDKLKIIAYG DDVIFSYKYA LDMEAIALEG VKYGLTITPA |
| hrv-65 | LVLDTYKYVN LDKLKILAYG DDILFSYPYD LDMKELADEG LKYGLTITPA |
| hrv-66 | LVLDAYKNID LDKLKIIAYG DDVIFSYKYQ LDMEAIAKEG TKYGLTITPA |
| hrv-67 | LVLDAYKHID LDKLKIIAYG DDVIFSYKYP LDMEAIAMEG KKYGLTITPA |
| hrv-68 | LVLDTYKFIN LDKLKILAYG DDVIFSYPYD LDMKELASEG TKYGLSITPA |
| hrv-71 | LVLDTYKYVN LDKLKILAYG DDILFSYPYE MDMKELASEG VKYGLTITPA |
| dq473492-73 | LVLDAYKHID LDKLKIIAYG DDVIFSYKYP LDMEAIAVEG NKYGLTITPA |
| dq473494-74 | LVLDAYKHID LDKLKIIAYG DDVIFSYKYN LDMEAIAAEG LKYGLTITPA |
| dq473510-75 | LILDAYKYID LDKLKIIAYG DDIIFTYKYP LEMEAIAKEG IKYGLTITPA |
| dq473502-76 | LVLDAYKNID LDKLKIIAYG DDVIFSYKYQ LDMEAIASEG VKYGLTITPA |
| hrv-76 | LVLDAYKNID LDKLKIIAYG DDVIFSYKYQ LDMEAIASEG VKYGLTITPA |
| hrv-77 | LVLDAYKNID LDKLKIIAYG DDVIFSYKYQ LDMEAIAKEG VKYGLTITPA |
| hrv-78 | LVLDTYRHIN LDKLKILAYG DDVLFCYPYK LDMSELASEG RKYGLKITPA |
| ef173418-78 | LVLDTYRHIN LDKLKILAYG DDVLFCYPYK LDMSELASEG RKYGLKITPA |
| hrv-80 | LVLDTYKHIN LDKLKILAYG DDVLFSYPFE LDMKELASEG VKYGLTITPA |
| hrv-81 | LVLDAYKHID LDKLKIIAYG DDVIFSYKYK LDMEAIASEG QKYGLTITPA |
| hrv-81-f06 | LVLDAYKHID LDKLKIIAYG DDVIFSYKYK LDMEAIANEG QKYGLTITPA |
| hrv-81-f07 | LVLDAYKHID LDKLKIIAYG DDVIFSYKYK LDMEAIANEG QKYGLTITPA |
| hrv-82 | LVLDAYKHID LDKLKIIAYG DDVIFSYKYT LDMEAIAQEG SKYGLTITPA |
| dq473509-82 | LVLDAYKHID LDKLKIIAYG DDVIFSYKYT LDMEAIAQEG SKYGLTITPA |
| hrv-85 | LVLDAYKNID LDKLKIIAYG DDVIFSYKYQ LDMEAIAKEG VKYGLTITPA |
| pico-85 | LVLDAYKNID LDKLKIIAYG DDVIFSYKYQ LDMEAIAKEG VKYGLTITPA |
| dq473504-88 | LVLDAYKNID LDKLKILAYG DDVIFSYNFK LDMAILAKEG EKYGLTITPA |
| a10937-89 | LVLDAYKNID LDKLKILAYG DDVIFSYNFK LDMAVLAKEG EKYGLTITPA |
| hrv-89 | LVLDAYKNID LDKLKILAYG DDVIFSYNFK LDMAVLAKEG EKYGLTITPA |
| hrv-89-f08 | LVLDAYKNID LDKLKILAYG DDVIFSYNFK LDMAVLAKEG EKYGLTITPA |
| hrv-89-f09 | LVLDAYKNID LDKLKILAYG DDVIFSYNFK LDMAVLAKEG EKYGLTITPA |
| m16248-89 | LVLDAYKNID LDKLKILAYG DDVIFSYNFK LDMAVLAKEG EKYGLTITPA |
| hrv-90 | LVLDAYKNID LDKLKIIAYG DDVIFSYKYQ LDMEAIANEG KKYGLTITPA |
| hrv-94 | LVLDAYKYID LDKLKIIAYG DDVIFSYKYV LDMEAIAQEG VKYGLTITPA |
| ef173419-94 | LVLDAYKYID LDKLKIIAYG DDVIFSYKYV LDMEAIAQEG VKYGLTITPA |
| hrv-95 | IILHGYKNID LDQLRILTYG DDIIFTYPDK LDMSYLAQIG EQYGLRMTPA |
| hrv-96 | LVLDAYKHID LDKLKIIAYG DDVIFSYKYP LDMEAIALEG NKYGLTITPA |
| hrv-98 | LVLDAYKNID LDKLKIIAYG DDVIFSYKYQ LDMEAIAKEG VKYGLTITPA |
| hrv-100 | LVLDAYKNID LDKLKIIAYG DDVIFSYKYQ LDMEAIAKEG TKYGLAITPA |
| ef186077-qpm | LVLDTYKGIE LDKLKIVAYG DDVIASYPEE LDPAQIAVSG LKYGLTITPA |
| ef077279-nat001 | LVLDTYKGIE LDKLKIVAYG DDVIASYPEE LDPAQIAVSG LKYGLTITPA |
| ny1078 | LVLDTYKGIE LDKLKIVAYG DDVIASYPEE LDPAEIAISG LKYGLTITPA |
| ef582385-c024 | LVLETYKNIN LDKLRIIAYG DDVVASYPDE LDPKEIAMTA KRYGLTITPP |
| ef077280-nat045 | LVLETYKNID LDRLKIVAYG DDVIASYPEY LDPKEIAETG LKYGLTITPA |
| ef582387-c026 | LVLDTYKGIE LDKLKIVAYG DDVIASYPEE LDPAQIAISG LKYGLTITPA |
| ef582386-c025 | ITIETYKNID LDKLKIVAYG DDVVISYPDM LDAAQLADTG SKYGLTITPA |
| dq473485-03 | LILDAYKGID LDSLRILAYG DDLIVSYPFE LDSNILAAIG KNYGLTITPP |
| ef173422-03 | LILDAYKGID LDSLRILAYG DDLIVSYPFE LDSNILAAIG KNYGLTITPP |
| dq473490-04 | LVLDVYKGID LDSLKIIAYG DDVIISYPFT LDSEVIAKQG SKYGLTITPP |
| hrv-05 | LILDVYKGID LDSLRIIAYG DDVIISYPFP LDPEKIAEQG AIYGLTITPP |
| dq473486-06 | LVLDAYKGID LDKLKILAYG DDLIVSYPYE LDPEVLATLG KKYGLTITPP |
| l05355-14 | LILDAYKGID LDKLKILAYG DDLIVSYPYE LDPQVLATLG KNYGLTITPP |
| k02121-14 | LILDAYKGID LDKLKILAYG DDLIVSYPYE LDPQVLATLG KNYGLTITPP |
| ef173420-17 | LILDVYKGID LDKLKVIAYG DDLIVSYPFE LQPELLALAG KKYGLTITPP |
| hrv-26 | LILDVYKGIE LDSLRIIAYG DDVIISYPFT LDAEKISEQG LKYGLTITPP |
| hrv-27 | LILDTYKGID LDKLRIIAYG DDIIASYPFE LDSEKIAQQG AKYGLTITPP |
| ef173421-27 | LILDTYKGID LDKLRIIAYG DDIIASYPFE LDSEKIAQQG AKYGLTITPP |
| dq473487-35 | LILDAYKGID LDKLKVIAYG DDLIVSYPFE LDPGVLASHG KNYGLTITPP |
| hrv-35 | LILDAYKGID LDKLKVIAYG DDLIVSYPFE LDPGVLASHG KNYGLTITPP |
| ef173423-37 | LILDAYKGID LDKLKILAYG DDLIVSYPYE LNPEVLATLG KNYGLTITPP |
| hrv-42 | LILDVYKGIE LDSLRIIAYG DDVIVSYPFP LDPEKIAQQG VIYGLTITPP |
| dq473488-48 | LILDVYKGID LDKLKVIAYG DDLIVSYPFE LQPDLLALAG KKYGLTITPP |
| hrv-52 | LILDVYKGID LDKLKVIAYG DDLIVSYPFE LQPELLASAG KKYGLTITPP |
| hrv-52-f10 | LILDVYKGID LDKLKVIAYG DDLIVSYPFE LQPELLASAG KKYGLTITPP |
| ef173424-52 | LILDVYKGID LDKLKVIAYG DDLIVSYPFE LQPELLASAG KKYGLTITPP |
| hrv-69 | LILDVYKGID LDKLKVIAYG DDLIVSYPFE LQPELLAQAG KGYGLTITPP |
| dq473489-70 | LILDVYKGID LDKLKVIAYG DDLIVSYPFE LQPELLALAG KKYGLTITPP |
| hrv-72 | LVLDAYKGID LDKLKIIAYG DDLIVSYPYE LNPEVLATLG KSYGLTITPP |
| hrv-79 | LILDAYKGID LDKLKVIAYG DDLIVSYPFE LDPEVLATLG KNYGLVITPP |
| hrv-83 | LILDAYKGID LDKLKIIAYG DDLIASYPFE LDPEVLAKLG KNYGLTITPP |
| hrv-84 | LILDVYKGID LDKLKIIAYG DDVIISYPYE LDPERIAEQG KTYGLTITPP |
| hrv-86 | LILDAYKGID LDKLRVIAYG DDLIVSYPFE LDPSVLASMG KKYGLTITPP |
| hrv-91 | LILDVYKGID LDKLKVIAYG DDLIVSYPFE LQPELLALAG KKYGLTITPP |
| hrv-92 | LVLDAYKGID LDKLKVIAYG DDLIVSYPFE LDPGVLANLG KNYGLTITPP |
| ef173425-93 | LILDTYKGID LDKLRIIAYG DDIIASYPFE LDSEKIAQQG TKYGLTITPP |
| hrv-97 | LILDTYKGID LDKLRIIAYG DDIIASYPFE LDSEKIAQQG TKYGLTITPP |
| hrv-99 | LILDVYKGID LDSLRIIAYG DDVIVSYPFS LDPERIARQG STYGLTITPP |
| | 2151 2200 |
| annotation | HHH....... ....BB..BB BBB....... BBBB.HHHHH HHHHH..... |
| af499637-cva13 | DKSTTFETVT WENVTFLKRF FRADEKYPFL IHPVMPMKEI HESIRWTKDP |
| af546702-cva21 | DKSATFETVT WENVTFLKRF FRADEKYPFL VHPVMPMKEI HESIRWTKDP |
| v01149-pv1m | DKSATFETVT WENVTFLKRF FRADEKYPFL IHPVMPMKEI HESIRWTKDP |
| d00239-01 | DKSTEFKKLD YNNVTFLKRG FKQDEKHTFL IHPTFPVEEI YESIRWTKKP |
| pico-01 | DKSNEFKKLD YSNVTFLKRG FKQDERHTFL IHPTFPVEEI HESIRWTKKP |
| hrv-01 | DKSNEFKKLD YSNVTFLKRG FKQDERHTFL IHPTFPVEEI HESIRWTKKP |
| x02316-02 | DKSNTFVKLD YSNVTFLKRG FKQDEKYNFL IHPTFPEDEI FESIRWTKKP |
| hrv-07 | DKSSTFQELT YKNVTFLKRG FRADDRHSFL IHPTFPATEI YDSIRWTKNP |
| dq473503-07 | DKSSTFQELT YKNVTFLKRG FRADDRHSFL IHPTFPATEI YDSIRWTKNP |
| hrv-08 | DKSDTFKDLD LSTATFLKRG FKPDTHHPFL IHPTYPIQDI YESIRWTKNP |
| pico-09 | DKSDTFKKLD YDSVTFLKRG FKQDSKYPFL IHPTFPVNEI HESIRWTKKP |
| hrv-09 | DKSDTFKKLD YDSVTFLKRG FKQDSKYPFL IHPTFPVSEI HESIRWTKKP |
| hrv-09-f01 | DKSDTFKKLD YDSVTFLKRG FKQDSKYPFL IHPTFPINEI HESIRWTKKP |
| hrv-09-f02 | DKSDTFKKLD YDSVTFLKRG FKQDSKYPFL IHPTFPINEI HESIRWTKKP |
| dq473498-10 | DKSDTFKQLN YGNVTFLKRG FKQDEKYQFL IHPTFPVEEI QESIRWTKKP |
| hrv-10 | DKSDTFKQLN YGNVTFLKRG FKQDEKYQFL IHPTFPVEEI QESIRWTKKP |
| ef173414-11 | DKSNVFKKLD YNNITFLKRG FRQDDKHNFL IHPTFPIDEI HESIRWTKKP |
| ef173415-12 | DKSDKFTKID FSNATFLKRG FRMDSKHSFL VHPTFPVEEI CESIRWTKNP |
| hrv-13 | DKSDTFKKLD YDNVTFLKRG FKQDAKYPFL IHPTFPVSEI HESIRWTKKP |
| hrv-13-f03 | DKSDTFKKLD YDNVTFLKRG FKQDAKYPFL IHPTFPVSEI HESIRWTKKP |
| dq473493-15 | DKSDNFQKLT YENVTFLKRG FKQDDKYPFL IHPTFPIQEI HESIRWTKKP |
| 124917-16 | DKSSEFKELD YGNVTFLKRG FRQDDKYKFL IHPTFPVEEI YESIRWTKKP |
| hrv-18 | DKSSEFKQLD YSNVTFLKRG FRQDDKYQFL IHPTFPIEEI HESIRWTKKP |
| hrv-19 | DKSETFTKLD YSNVTFLKRG FKQDIKYPFL IHPTFPINEI HESIRWTKKP |
| hrv-20 | DKSDTFRKLD YNNATFLKRG FKQDEKYGFL IHPIYPETEV WESIRWTKNP |
| hrv-21 | DKSTCFKQLD YSNVTFLKRG FKQDEKHQFL IHPTFPIEEI HESIRWTKNP |
| hrv-22 | DKSETFKELN YDTVTFLKRG FKQDIKYPFL VHPTFPVKEI HESIRWTKKP |
| dq473497-23 | DKSTTFRKLD YNNVTFLKRG FKQDEKYSFL IHPTFPENEI FESIRWTKKP |
| hrv-24 | DKSCEFKQLD YSNVTFLKRG FRQDEKHHFL IHPTFPVEEI QESIRWTKKP |
| ef173416-24 | DKSCEFKQLD YSNVTFLKRG FRQDEKHHFL IHPTFPVEEI QESIRWTKKP |
| hrv-25 | DKSNDFKQLN YNNVTFLKRG FRQDEKHQFL IHPTFPIEEI QESIRWTKKP |
| dq473508-28 | DKSDTFKKLD YNNATFLKRG FKQDEKYSFL IHPIYPETEV WESIRWTKNP |
| hrv-29 | DKSDCFKQLN YNNVTFLKRG FRQDEKHNFL IHPTFPVEEI QESIRWTKKP |
| dq473512-30 | DKSTTFRKLD YSNVTFLKRG FKQDEKYNFL IHPTFPENEI FESIRWTKKP |
| hrv-30 | DKSTTFRKLD YSNVTFLKRG FKQDEKYNFL IHPTFPENEI FESIRWTKKP |
| hrv-31 | DKSSEFKKLD YNSVTFLKRG FKQDERYSFL IHPIFPIDEI HESIRWTKKP |
| hrv-32 | DKSDTFKKLD YDSVTFLKRG FKQDSKYPFL IHPTFPVSEI HESIRWTKKP |
| hrv-33 | DKSSIFKKLD YSNITFLKRG FRQDEKHNFL IHPTFPIDEI HESIRWTKKP |
| hrv-34 | DKSDKFKQLD YSNVTFLKRG FKQDEKHNFL IHPTFPIEEI QESIRWTKKP |
| dq473501-34 | DKSDKFKQLD YSNVTFLKRG FKQDEKHNFL IHPTFPIEEI QESIRWTKKP |
| dq473505-36 | DKSDTFQELT YKNVTFLKRG FRADERHSFL VHPTFPVAEI HDSIRWTKNP |
| hrv-38 | DKSSEFKQLD YSNVTFLKRG FKQDDRYQFL IHPTFPIDEI QESIRWTKKP |
| dq473495-38 | DKSSEFKQLD YSNVTFLKRG FKQDDRYQFL IHPTFPIDEI QESIRWTKKP |
| ay751783-39 | DKSDIFRKLD YSNVTFLKRG FRQDEKYNFL IHPTFPESEI FESIRWTKKP |
| hrv-40 | DKSNEFKQLN YNNVTFLKRG FKQDDKYQFL IHPTFPIDEI HESIRWTKKP |
| dq473491-41 | DKSDTFKKLD YDSVTFLKRG FRQDAKYPFL IHPTFPVSEI HESIRWTKKP |
| hrv-43 | DKSETFTKLD YNNVTFLKRG FKQDVKYPFL IHPTFPVQEI HESIRWTKKP |
| dq473499-44 | DKSDCFKQLD YNNVTFLKRG FRQDEKHNFL IHPTFPVEEI QESIRWTKKP |
| hrv-45 | DKSDTFKDLD LSTATFLKRG FKPDSKHPFL VHPIYPIQDI YESIRWTKNP |
| dq473506-46 | DKSDKFEKLD YGNATFLKRG FKQDNRYKFL IHPIYPESEV WESIRWTKNP |
| hrv-47 | DKSSEFKKLD YNSVTFLKRG FKQDDKYSFL IHPTFPVDEI QESIRWTKKP |
| dq473496-49 | DKSTTFVKLN YNNVTFLKRG FKQDEKYNFL IHPTFPESEI FESIRWTKKP |
| hrv-49-f04 | DKSTTFVKLN YNNVTFLKRG FKQDEKYNFL IHPTFPESEI FESIRWTKKP |
| hrv-50 | DKSENFKQLD YNNVTFLKRG FKQDEKYSFL IHPTFPIEEI QESIRWTKKP |
| hrv-51 | DKSDTFQKLD FSNATFLKRG FKPDEKHSFL VHPIYPEEEV WESIRWTKNP |
| dq473507-53 | DKSDKFEKLN YENATFLKRG FKQDDRYKFL IHPIYPESEV WESIRWTKNP |
| hrv-54 | DKSSEFKKLD YSNVTFLKRG FKQDDRYSFL IHPTFPVNEI QESIRWTKKP |
| hrv-54-f05 | DKSSEFKKLD YSNVTFLKRG FKQDERYSFL IHPTFPVNEI QESIRWTKKP |
| dq473511-55 | DKSTSFKQLD YNNVTFLKRG FKQDEKHQFL IHPTFPVEEI HESIRWTKNP |
| hrv-56 | DKSSTFKQLD YSNVTFLKRG FKQDEKYQFL IHPTFPVEEI QESIRWTKKP |
| hrv-57 | DKSTHFKQLD YNNVTFLKRG FRQDEKHQFL IHPTFPIEEI YESIRWTKNP |
| hrv-58 | DKSDVFQELT YKNVTFLKRG FRADDRHSFL IHPTFPVVEI HDSIRWTKNP |
| dq473500-59 | DKSTTFKQLD YSNVTFLKRG FKQDDKYRFL IHPTFPVEEI QESIRWTKKP |
| hrv-60 | DKSSEFKQLD YSNVTFLKRG FKQDDKYHFL IHPTFPIEEI HESIRWTKKP |
| hrv-61 | DKSDTFKKLD YSSVTFLKRG FKQDDKYSFL IHPTFPISEI HESIRWTKKP |
| hrv-62 | DKSNDFKQLD YNNVTFLKRG FRQDEKHQFL IHPTFPVEEI QESIRWTKKP |
| hrv-63 | DKSSTFTQLN YDNVTFLKRG FKQDEKHQFL IHPTFPVEEI QESIRWTKKP |
| hrv-64 | DKSETFRQLD YSNVTFLKRG FKQDAKYPFL IHPTFPIKEI HESIRWTKKP |
| ef173417-64 | DKSETFRQLD YSNVTFLKRG FKQDAKYPFL IHPTFPIKEI HESIRWTKKP |
| hrv-65 | DKSDVFKKLD FGNATFLKRG FRPDEKHSFL IHPVYPEEEV WESIRWTKNP |
| hrv-66 | DKSSEFKQLD YNNVTFLKRG FRQDERYTFL IHPTFPIEEI QESIRWTKKP |
| hrv-67 | DKSDTFKKLD YDSVTFLKRG FKQDSKYPFL IHPTFPVNEI HESIRWTKKP |
| hrv-68 | DKSDTFKKLD YSNATFLKRG FKQDEKYSFL IHPIYPETEV WESIRWTKNP |
| hrv-71 | DKSEEFSKLD FTNATFLKRN FKPDDKHSFL IHPVYPETEV WESIRWTKNP |
| dq473492-73 | DKSDTFRKLD YDNVTFLKRG FRQDAKYPFL IHPTFPVSEI HESIRWTKKP |
| dq473494-74 | DKSDCFKKLD YNTVTFLKRG FKPDDKYPFL IHPTFPIQEI HESIRWTKKP |
| dq473510-75 | DKSETFEKLD YNNVTFLKRG FKQDAKYPFL VHPTFPVQEI HESIRWTKKP |
| dq473502-76 | DKSSVFKRLD YSNITFLKRG FRQDEKHNFL IHPTFPIDEI HESIRWTKKP |
| hrv-76 | DKSSVFKRLD YSNITFLKRG FRQDEKHNFL IHPTFPIDEI HESIRWTKKP |
| hrv-77 | DKSSEFKQLD YNNVTFLKRG FRQDDKYKFL IHPTFPVDEI HESIRWTKKP |
| hrv-78 | DKSEKFIDLS YENATFLKRG FQPDQKHSFL IHPTFPISEI HNSIRWTRSP |
| ef173418-78 | DKSEKFIDLS YENATFLKRG FQPDQKHSFL IHPTFPISEI HNSIRWTRSP |
| hrv-80 | DKTEEFRKLD FGNATFLKRG FKVDDKYSFL VHPLYPEKEV WESIRWTKNP |
| hrv-81 | DKSTKFKDLD YKNVTFLKRG FRQDERYSFL IHPTFPVEEI YESIRWTKKP |
| hrv-81-f06 | DKSTEFKELD YKNVTFLKRG FRQDERYSFL IHPTFPVEEI YESIRWTKKP |
| hrv-81-f07 | DKSTEFKELD YKNVTFLKRG FRQDERYSFL IHPTFPVEEI YESIRWTKKP |
| hrv-82 | DKSETFKKLD YSNVTFLKRG FKQDERYSFL IHPTFPIDEI HESIRWTKKP |
| dq473509-82 | DKSETFKKLD YSNVTFLKRG FKQDERYPFL IHPTFPIDEI HESIRWTKKP |
| hrv-85 | DKSSEFKQLN YNNVTFLKRG FKQDDKYQFL IHPTFPIEEI QESIRWTKKP |
| pico-85 | DKSSEFKQLN YNNVTFLKRG FKQDDKYQFL IHPTFPIEEI QESIRWTKKP |
| dq473504-88 | DKSNVFQELT YNNVTFLKRG FRADEKHSFL IHPTFPVAEI YDSIRWTKNP |
| a10937-89 | DKSDVFQELT YKNVTFLKRG FRADERHSFL IHPTFPVAEI HDSIRWTKNP |
| hrv-89 | DKSDVFQELT YKNVTFLKRG FRADERHSFL IHPTFPVAEI HDSIRWTKNP |
| hrv-89-f08 | DKSDVFQELT YKNVTFLKRG FRADERHSFL VHPTFPVAEI YDSIRWTKNP |
| hrv-89-f09 | DKSDVFQELT YKNVTFLKRG FRADERHSFL VHPTFPVAEI YDSIRWTKNP |
| m16248-89 | DKSDVFQELT YKNVTFLKRG FRADERHSFL IHPTFPVAEI HDSIRWTKNP |
| hrv-90 | DKSSEFKQLS YENVTFLKRG FRQDEKHSFL IHPIFPIEEI HESIRWTKKP |
| hrv-94 | DKSDTFKELS YDNVTFLKRG FKQDTKYSFL VHPTFPVKEI HESIRWTKKP |
| ef173419-94 | DKSDTFKELS YDNVTFLKRG FKQDTKYSFL VHPTFPVKEI HESIRWTKKP |
| hrv-95 | DKSDTFKDLD LSTATFLKRG FKPDTHHPFL IHPTYPIQDI YESIRWTKNP |
| hrv-96 | DKSDTFKKLD YNSVTFLKRG FKQDDKYPFL IHPTFPISEI HESIRWTKKP |
| hrv-98 | DKSNEFKKLD YSNVTFLKRG FKQDNKYSFL IHPTFPIDEI QESIRWTKKP |
| hrv-100 | DKSNCFKQLD YDNVTFLKRG FRQDEKHQFL IHPTFPVEEI QESIRWTKKP |
| ef186077-qpm | DKSDQFVKVN WDNATFLKRG FRVDERYSFL VHPVFPEKEI FESIRWTRDP |
| ef077279-nat001 | DKSDQFVKVN WDNATFLKRG FRVDKRYNFL IHPVFPEKEI FESIRWTRDP |
| ny1078 | DKSSQFTKID WTNATFLKRG FKADEKHSFL IHPTFPESEI FESIRWTRDP |
| ef582385-c024 | DKTDQFSKMT WDNVTFLKRK FKPDSKYKFL IHPVYSMQDV YESIRWTKDP |
| ef077280-nat045 | DKSETFKPIT WETVTFLKRG FKPDEKYPFL IHPVYSMADI HESIRWTKDP |
| ef582387-c026 | DKSDHFVKVD WSNATFLKRG FRVDKKYSFL VHPVFPEKEI FESIRWTRDP |
| ef582386-c025 | DKGTDFKQVT WDTVTFLKRG FRNDLKYPFL VHPVYPMEDV FESIRWTKDP |
| dq473485-03 | DKSDAFTKIT WENITFLKRY FRPDPQFPFL IHPVMPMQDI YESIRWTRDP |
| ef173422-03 | DKSDAFTKIT WENITFLKRY FRPDPQFPFL IHPVMPMQDI YESIRWTRDP |
| dq473490-04 | DKSPNFTKMN WDNITFLKRY FKPDPDFPFL IHPVMPMADI HESIRWTKDP |
| hrv-05 | DKSPKFTKMD WNTVTFLKRH FKPDSEFPFL VHPVMPMTDI HESIRWTKDP |
| dq473486-06 | DKTEKFSKIT WDNLTFLKRY FRSDEQFPFL VHPVMPMQDI YESIRWTKDP |
| 105355-14 | DKSETFTKMT WENLTFLKRY FKPDQQFPFL VHPVMPMKDI HESIRWTKDP |
| k02121-14 | DKSETFTKMT WENLTFLKRY FKPDQQFPFL VHPVMPMKDI HESIRWTKDP |
| ef173420-17 | DKSEKFVKTT WENVTFLKRY FRPDPQYPFL IHPVMPMQDI HESIRWTRDP |
| hrv-26 | DKSPKFTKMD WHTVTFLKRH FKPDHEFPFL VHPVMPMSEI QESIRWTKDP |
| hrv-27 | DKSTQFHKIT WENVTFLKRY FRPDKQFPFL VHPVMPMSDI HESIRWTKDP |
| ef173421-27 | DKSTQFHKIT WENVTFLKRY FRPDKQFPFL VHPVMPMSDI HESIRWTKDP |
| dq473487-35 | DKSEKFEKMT WENLTFLKRY FKPDEQFPFL VHPVMPMQDI YESIRWTKDP |
| hrv-35 | DKSEKFEKMT WENLTFLKRY FKPDEQFPFL VHPVMPMQDI YESIRWTKDP |
| ef173423-37 | DKTEKFSKIT WDNLTFLKRY FRSDEQFPFL VHPVMPMQDI YESIRWTKDP |
| hrv-42 | DKSPKFTKMD WNTVTFLKRQ FKPDKEFPFL IHPVMPMSDI HESIRWTKDP |
| dq473488-48 | DKSESFSKTT WENVTFLKRY FKPDSQYPFL IHPVMPMQDI YESIRWTRDP |
| hrv-52 | DKSEKFTKTT WENVTFLKRY FRPDPQYPFL IHPVMPMQDI YESIRWTRDP |
| hrv-52-f10 | DKSEKFTKTT WENVTFLKRY FRPDPQYPFL IHPVMPMQDI HESIRWTRDP |
| ef173424-52 | DKSEKFTKTT WENVTFLKRY FRPDPQYPFL IHPVMPMQDI YESIRWTRDP |
| hrv-69 | DKSEKFTKTT WENVTFLKRY FRPDSQYPFL IHPVMPMQDI HESIRWTRDP |
| dq473489-70 | DKSEKFVKTT WENVTFLKRY FRPDPQYPFL IHPVMPMQDI HESIRWTRDP |
| hrv-72 | DKSAAFSKVT WENLTFLKRY FRPDKQFPFL VHPVMPMKDI HESIRWTKDP |
| hrv-79 | DKSEKFTKMT WENLTFLKRY FRPDEQFPFL IHPVMPMQDI YESIRWTKDP |
| hrv-83 | DKSEKFVKMT WENLTFLKRY FRPDEQFPFL IHPVMPMQDI HESIRWTKDP |
| hrv-84 | DKTEHFGKTD WSNVTFLKRN FRPDPEFPFL IHPVMPMADI HESIRWTKDP |
| hrv-86 | DKSENFTKMT WENITFLKRY FKPDKEFPFL IHPVMPMQDI HESIRWTKDP |
| hrv-91 | DKSEKFVKTT WENVTFLKRH FRPDPQYPFL IHPVMPMQDI HESIRWTRDP |
| hrv-92 | DKSEKFVKMT WENLTFLKRY FRPDEQFPFL IHPVMPMQDI HESIRWTKDP |
| ef173425-93 | DKSTQFHKVT WENVTFLKRH FRPDKQFPFL VHPVMPMTDI YESIRWTKDP |
| hrv-97 | DKSAQFHKIT WENVTFLKRY FRPDKQFPFL VHPVMPMSDI HESIRWTKDP |
| hrv-99 | DKSPEFTKMN WNNVTFLKRH FKPDSEFPFL IHPVMPMSDI YESIRWTKDP |
| | 2201 2250 |
| annotation | .HHHHHHHHH HHHHH..HHH HHHHHHHHHH .HHHHHHH.. .HHHHHHHHH |
| af499637-cva13 | RNTQDHVRSL CLLAWHNGEE EYNKFLAKIR SVPIGRALLL PEYSTLYRRW |
| af546702-cva21 | RNTQDHVRSL CLLAWHNGEE EYNKFLAKIR SVPIGRALLL PEYSTLYRRW |
| v01149-pv1m | RNTQDHVRSL CLLAWHNGEE EYNKFLAKIR SVPIGRALLL PEYSTLYRRW |
| d00239-01 | SQMQEHVLSL CHLMWHNGRK VYEDFSSKIR SVSAGRALYI PPYDLLKHEW |
| pico-01 | SQMQEHVLSL CHLMWHNGRK VYEDFSSKIR SVSAGRALYI PPYDLLKHEW |
| hrv-01 | SQMQEHVLSL CHLMWHNGRK VYEDFSSKIR SVSAGRALYI PPYDLLKHEW |
| x02316-02 | SQMHEHVLSL CHLMWHNGRD AYKKFVEKIR SVSAGRALYI PPYDLLLHEW |
| hrv-07 | SCMQEHVLSL CHLMWHNGRH EYQNFVKGIR SVSAGRALYI PAYEVLEHEW |
| dq473503-07 | SCMQEHVLSL CHLMWHNGRH EYQNFVKGIR SVSAGRALYI PAYEVLEHEW |
| hrv-08 | RCLQEHVLSL AHLCWHNGPE QYADFIGKIR SIPIGRSLYL PSYDVLLYEW |
| pico-09 | SQMQEHVLSL CHLMWHNGRD VYKEFESGIR SVS.GRALYI PPYELLLHEW |
| hrv-09 | SQMQEHVLSL CHLMWHNGRD VYKEFENGIR SVSAGRALYI PPYELLLHEW |
| hrv-09-f01 | SQMQEHVLSL CHLMWHNGRD VYKEFENGIR SVSAGRALYI PPYELLLHEW |
| hrv-09-f02 | SQMQEHVLSL CHLMWHNGRD VYKEFENGIR SVSAGRALYI PPYELLLHEW |
| dq473498-10 | SQMQEHVLSL CHLMWHNGRS VYKQFEERIR SVSAGRALYI PPYDLLLHEW |
| hrv-10 | SQMQEHVLSL CHLMWHNGRS VYKQFEERIR SVSAGRALYI PPYDLLLHEW |
| ef173414-11 | SQMQEHVLSL CHLMWHNGRD VYTQFEKRIR SVSAGRALYI PPYDLLLHEW |
| ef173415-12 | RCMQEHVLSL CYLMWHNGKQ AYEDFVSKIR SVAAGRALYI PGYEVLEHEW |
| hrv-13 | SQMQEHVLSL CHLMWHNGQD VYKEFERKIR SVSAGRALYI PPYELLLHEW |
| hrv-13-f03 | SQMQEHVLSL CHLMWHNGRD VYNEFERKIR SVSAGRALYI PPYELLLHEW |
| dq473493-15 | SQMQEHVLSL CHLMWHNGRD VYKEFEKGIR SVSAGRALYI PPYELLQHEW |
| 124917-16 | SQMQEHVLSL CHLMWHNGPE IYKDFETKIR SVSAGRALYI PPYELLRHEW |
| hrv-18 | SQMQEHVLSL CHLMWHNGKN VYKQFEQRIR SVSAGRALYI PPYELLLHEW |
| hrv-19 | SQMQEHVLSL CHLMWHNGRD EYKEFERRIR SVSAGRALYI PPYEMLLHEW |
| hrv-20 | RNMQEHVLSL CHLMWHNGKD KYKHFVDKIR SVSAGRALYI PPYEVLLHEW |
| hrv-21 | SQMQEHVLSL CHLMWHNGRD VYKQFEKRIR SVGAGRALYI PPYDLLLHEW |
| hrv-22 | SQMQEHVLSL CHLMWHNGRD VYSEFERKIR SVSAGRALYI PPYELLLHEW |
| dq473497-23 | SQMHEHVLSL CHLMWHNGRD AYKGFVEKIR SVSAGRMLYI PPYDLLLHEW |
| hrv-24 | SQMQEHVLSL CHLMWHNGRD IYKQFEQKIR SVSAGRALYV PPYDLLLHEW |
| ef173416-24 | SQMQEHVLSL CHLMWHNGRD IYKQFEQKIR SVSAGRALYV PPYDLLLHEW |
| hrv-25 | SQMQEHVLSL CHLMWHNGRD VYKKFEERIR SVGAGRALYI PPYDLLLHEW |
| dq473508-28 | RNMQEHVLSL CHLMWHNGKE KYKHFVDKIR SVSAGRALYI PPYEVLLHEW |
| hrv-29 | SQMQEHVLSL CHLMWHNGRD VYKXFEDRIR SVSAGRALYI PPYDLLLHEW |
| dq473512-30 | SQMHEHVLSL CHLMWHNGRD AYKGFVEKIR SVSAGRMLYI PPYDLLLHEW |
| hrv-30 | SQMHEHVLSL CHLMWHNGRD AYKGFVEKIR SVSAGRMLYI PPYDLLLHEW |
| hrv-31 | SQMQEHVLSL CHLMWHNGRD VYKQFEQKIR SVSAGRALYI PPYDLLLHEW |
| hrv-32 | SQMQEHVLSL CHLMWHNGRD VYKEFERGIR SVSAGRALYI PPYELLLHEW |
| hrv-33 | SQMQEHVLSL CHLMWHNGRD VYTQFERRIR SVSAGRALYI PPYDLLLHEW |
| hrv-34 | SQMQEHVLSL CHLMWHNGRD VYKQFEERIR SVSAGRALYI PPYDLLLHEW |
| dq473501-34 | SQMQEHVLSL CHLMWHNGRD VYKQFEERIR SVSAGRALYI PPYDLLLHEW |
| dq473505-36 | SCMQEHVLSL CHLMWHNGKH TYQEFVKGIR SVSAGRALYI PAYEVLEHEW |
| hrv-38 | SQMQEHVLSL CHLMWHNGKD VYKQFERKIR SVSAGRALYI PPYEVLLHEW |
| dq473495-38 | SQMQEHVLSL CHLMWHNGKD VYKQFERKIR SVSAGRALYI PPYEVLLHEW |
| ay751783-39 | SQMQEHVLSL CHLMWHNGQS AYKSFVERIR SVSAGRALYI PPYDLLLHEW |
| hrv-40 | SQMQEHVLSL CHLMWHNGKD VYKQFEQRIR SVSAGRALYI PPYELLLHEW |
| dq473491-41 | SQMQEHVLSL CHLMWHNGQD VYREFERKIR SVSAGRALYI PPYELLLHEW |
| hrv-43 | SQMQEHVLSL CHLMWHNGQD VYKEFERRIR SVSAGRALYI PPYEMLLHEW |
| dq473499-44 | SQMQEHVLSL CHLMWHDGRD VYKQFVERIR SVSAGRALYI PPYDLLLHEW |
| hrv-45 | RCLQEHVLSL AHLCWHSGPE QYADFVKRIR STSVGKNLYI PSYDVLLYEW |
| dq473506-46 | RNMQEHVLSL CHLMWHNGRD KYESFVNRIR SVSAGRALYI PPYEVLLHEW |
| hrv-47 | SQMQEHVLSL CHLMWHNGRD VYKQFEQKIR SVSAGRALYI PPYDLLLHEW |
| dq473496-49 | SQMHEHVLSL CRLMWHNGRD AYEKFVEKIR SVSAGRALYI PPYNLLLHEW |
| hrv-49-f04 | SQMHEHVLSL CHLMWHNGRD AYEKFVEKIR SVSAGRALYI PPYNLLLHEW |
| hrv-50 | SQMQEHVLSL CHLMWHNGRD VYKQFEQRIR SVGAGRALYI PPYDLLLHEW |
| hrv-51 | RNMQEHVLSL CHLMWHNGKS KYHEFVAKIR SVSAGRALYI PPFELLXHEW |
| dq473507-53 | RNMQEHVLSL CHLMWHNGKD KYDSFVNKIR SVSAGRALYI PPYELLLHEW |
| hrv-54 | SQMQEHVLSL CHLMWHNGKD VYKQFEQKIR SVGAGRALYI PPYDLLLHEW |
| hrv-54-f05 | SQMQEHVLSL CHLMWHNGRD VYKQFEQKIR SVSAGRALYI PPYDLLLHEW |
| dq473511-55 | SQMQEHVLSL CRLMWHNGRD VYKQFEKQIR SVSAGRALYI PPYDLLLHEW |
| hrv-56 | SQMQEHVLSL CHLMWHNGRS AYKQFEERIR SVSAGRALYI PPYDLLLHEW |
| hrv-57 | SQMQEHVLSL CHLMWHNGKD VYKKFEKQIR SVGAGRALYI PPYDLLLHEW |
| hrv-58 | SCMQEHVLSL CHLMWHNGRH AYQEFVKGIR SVFAGRALYI PAYEVLEHEW |
| dq473500-59 | SQMQEHVLSL CHLMWHNGRD TYKQFEDKIR SVSAGRALYI PPYDLLLHEW |
| hrv-60 | SQTQEHILSL CHLMWHNGRD VYKQFEHKIR SVSAGRALYI PPYELLQHEW |
| hrv-61 | SQMQEHVLSL CHLMWHNGRD VYKEFERKIR SVSAGRALYI PPYDLLLHEW |
| hrv-62 | SQMQEHVLSL CHLMWHNGRD VYKKFEERIR SVSAGRALYI PPYDLLLHEW |
| hrv-63 | SQMQEHVLSL CHLMWHNGRD IYKQFEERIR SVSAGRALYI PPYDLLLHEW |
| hrv-64 | SQMQXHVLSL CHLMWHNGQD VYKEFERKIR SVSAGRALYI PPYELLLHEW |
| ef173417-64 | SQMQDHVLSL CHLMWHNGQD VYKEFERKIR SVSAGRALYI PPYELLLHEW |
| hrv-65 | RNMQEHVLSL CHLMWHNGED KYQHFVAKIR SVSAGRALYI PPYELLRHEW |
| hrv-66 | SQMQEHVLSL CHLMWHNGRD AYKQFEQKIR SVSAGRALYI PPYDLLLHEW |
| hrv-67 | SQMQEHVLSL CHLMWHNGRD VYKEFERGIR SVSAGRALYI PPYELLLHEW |
| hrv-68 | RNMQEHVLSL CHLMWHNGKE KYKHFVDKIR SVSAGRALYI PPYEVLLHEW |
| hrv-71 | RNMQEHVLSL CHLMWHNGEE KYNHFVTKIR SVSAGRALYI PPYELLRHEW |
| dq473492-73 | SQMQEHVLSL CHLMWHNGRD VYKEFERKIR SVSAGRALYI PPYELLLHEW |
| dq473494-74 | SQMQEHVLSL CHLMWHNGKD VYKEFERGIR SVSAGRALYI PPYELLQHEW |
| dq473510-75 | SQMQEHVLSL CHLMWHNGPE VYKDFENKIR SVSAGRALYI PPYDLLLHEW |
| dq473502-76 | SQMQEHVLSL CHLMWHNGRD VYTQFERRIR SVSAGRALYI PPYDLLLHEW |
| hrv-76 | SQMQEHVLSL CHLMWHNGRD VYTQFERRIR SVSAGRALYI PPYDLLLHEW |
| hrv-77 | SQMQEHVLSL CHLMWHNGKD VYKQFEQKIR SVSAGRALYI PPYELLLHEW |
| hrv-78 | RNMQEHVLSL CQLMWHNGEE AYKEFVCKIR SVSAGRALYI PPFEVLRHEW |
| ef173418-78 | RNMQEHVLSL CQLMWHNGEE AYKEFVCKIR SVSAGRALYI PPFEVLRHEW |
| hrv-80 | RNMQEHVLSL CHLXWHNGKE PYNHFVAKIR SVSAGRALYI PPYEVLCHEW |
| hrv-81 | SQMQEHVLSL CHLMWHNGPE IYRDFETKIR SVSAGRALYI PPYDLLRHEW |
| hrv-81-f06 | SQMQEHVLSL CHLMWHNGPE IYRDFETKIR SVSAGRALYI PPYDLLRHEW |
| hrv-81-f07 | SQMQEHVLSL CHLMWHNGPE IYRDFETKIR SVSAGRALYI PPYDLLRHEW |
| hrv-82 | SQMQEHVLSL CHLMWHNGYE VYRDFERKIR SVSAGRALYI PPYEMLLHEW |
| dq473509-82 | SQMHEHILSL CHLMWHNGHE VYRDFERKIR SVSAGRALYI PPYEVLLHEW |
| hrv-85 | SQMQEHVLSL CHLMWHNGKD VYKQFEQKIR SVSAGRALYI PPYELLLHEW |
| pico-85 | SQMQEHVLSL CHLMWHNGKD VYKQFEQKIR SVSAGRALYI PPYELLLHEW |
| dq473504-88 | SCMQEHVLSL CHLMWHNGRH EYQSFVDRIR SVSAGRALYI PAYEVLEYEW |
| a10937-89 | SCMQEHVLSL CHLMWHNGRH AYQEFIKGIR SVSAGRALYI PAYEVLEHEW |
| hrv-89 | SCMQEHVLSL CHLMWHNGRH AYQEFIKGIR SVSAGRALYI PAYEVLEHEW |
| hrv-89-f08 | SCMQEHVLSL CHLMWHNGRH AYQEFIKGIR SVSAGRALYI PAYEVLEHEW |
| hrv-89-f09 | SCMQEHVLSL CHLMWHNGRH AYQEFTKGIR SVSAGRALYI PAYEVLEHEW |
| m16248-89 | SCMQEHVLSL CHLMWHNGRH AYQEFIKGIR SVSAGRALYI PAYEVLEHEW |
| hrv-90 | SQMQEHVLSL CHLMWHNGKD VYKQFEQKIR SVSAGRALYI PPYDVLLHEW |
| hrv-94 | SQMQEHVLSL CHLMWHNGQE EYNDFVRKIR SVSAGRALYI PPYEMLLHEW |
| ef173419-94 | SQMQEHVLSL CHLMWHNGQE EYNDFVRKIR SVSAGRALYI PPYEMLLHEW |
| hrv-95 | RCLQEHVLSL AHLCWHNGPE QYADFIGKIR SIPIGRSLYL PSYDVLLYEW |
| hrv-96 | SQMQEHVLSL CHLMWHNGRD VYKEFERKIR SVSAGRALYI PPYELLLHEW |
| hrv-98 | SQMQEHVLSL CHLMWHNGRD VYKQFEQKIR SVSAGRALYI PPYDLLLHEW |
| hrv-100 | SQMQEHVLSL CHLMWHNGRD VYKQFEDKIR SVSAGRALYI PPYDLLLHEW |
| ef186077-qpm | KNTQDHVYSL CLLMWHNGEE PYKEFISKIR KTEVGRRLYL PPYNLLERTW |
| ef077279-nat001 | KNTQDHVYSL CLLMWHNGEG PYKEFIDKIR KTEVGRRLYL PPYNLLERSW |
| ny1078 | KNTQDHVYSL CLLMWHNGEK PYREFVDRIR RTDVGRRLYL PPYSLLQRAW |
| ef582385-c024 | KNTQDHVHSL CLLAWHNGEE VYEDFCAKIR TTSVGKSLYL PPYKYLYRQW |
| ef077280-nat045 | KNTQDHVRSL CTLAWHNGEE QYNTFLSKIR TVPVGRTLSL PPYSYLRHRW |
| ef582387-c026 | KNTQDHVYSL CLLMWHNGEE PYKEFINKIR KTEVGRRLYL PPYNLLERTW |
| ef582386-c025 | RNTQDHVNSL CLLAWHNGKQ QYDDFIQKVR TTSVGRTLYL PPYEYLERRW |
| dq473485-03 | RNTQDHVRSL CMLAWHSGEK DYNDFITKIR TTDIGKCLNL PEYSVLRRRW |
| ef173422-03 | RNTQDHVRSL CMLAWHSGEK DYNDFITKIR TTDIGKCLNL PEYSVLRRRW |
| dq473490-04 | KNTQDHVRSL CMLAWHSGEQ EYNKFVEGIR STDIGKVLVI PSYSVLRRRW |
| hrv-05 | KNTQDHVRSL CMMAWHSGED EYNKFVNGIR STEIGKALLI PSYSVLRHRW |
| dq473486-06 | RNTQDHVRSL CMLAWHSGEK EYNDFIQRIR TTDIGKCLNL PEYSVLRRRW |
| 105355-14 | KNTQDHVRSL CMLAWHSGEK EYNEFIQKIR TTDIGKCLIL PEYSVLRRRW |
| k02121-14 | KNTQDHVRSL CMLAWHSGEK EYNEFIQKIR TTDIGKCLIL PEYSVLRRRW |
| ef173420-17 | KNTQDHVRSL CMLAWHSGEE EYKNFTEKIR STNIGKCLLI PEYSVLRRRW |
| hrv-26 | KNTQDHVRSL CMMAWHSGEE EYNKFVEGIR STDIGKVLLI PSYSVLRRRW |
| hrv-27 | KNTQDHVRSL CMLAWHSGEK EYDEFVRGIR STDIGKVLVI PPYSVLRHRW |
| ef173421-27 | KNTQDHVRSL CMLAWHSGEK EYDEFVRGIR STDIGKVLVI PPYSVLRHRW |
| dq473487-35 | KNTQDHVRSL CMLAWHSGQK EYEHFIERIR SVNIGRCLNL PEYSVLRKRW |
| hrv-35 | KNTQDHVRSL CMLAWHSGQK EYEHFIERIR SVNIGRCLNL PEYSVLRKRW |
| ef173423-37 | RNTQDHVRSL CMLAWHSGER EYNDFIQKIR TTDIGKCLNL PEYSVLRKRW |
| hrv-42 | KNTQDHIRSL CMMAWHSGED EYNKFVDGIR STDIGKALLI PSYSVLRRRW |
| dq473488-48 | RSTQDHVRSL CMLAWHSGEK EYKDFVDKIR STSIGKCLLI PEYSVLRRRW |
| hrv-52 | KNTQDHIRSL CMLAWHSGEE EYKNFIEKIR STSIGKCLLI PEYSVLRRRW |
| hrv-52-f10 | KNTQDHVRSL CMLAWHSGEE EYKNFTEKIR STSIGKCLLI PEYSVLRRRW |
| ef173424-52 | KNTQDHIRSL CMLAWHSGEE EYKNFIEKIR STSIGKCLLI PEYSVLRRRW |
| hrv-69 | RNTQDHIRSL CMLAWHSGEE EYKVFTDKIR STSIGKCLLI PEYSVLRRRW |
| dq473489-70 | KNTQDHVRSL CMLAWHSGEE EYKNFTEKIR STSIGKCLLI PEYSVLRRRW |
| hrv-72 | KNTQDHVRSL CMLAWHSGEE EYNEFIRKIR TTDIGKCLIL PEYSVLRKRW |
| hrv-79 | RNTQDHVRSL CMLAWHSGQK EYNEFIGKIR TTDIGKCLNL PEYSVLRRRW |
| hrv-83 | RNTQDHVRSL CMLAWHSGQK EYNEFITKIR TTEIGKCLNL PEYSVLRRRW |
| hrv-84 | KNTQDHVRSL CMLAWHSGEE EYEKFVKGIR STSVGKALVI PSYSVLRRRW |
| hrv-86 | KNTQDHVRSL CMLAWHSGES EYNDFLSKIR TTDIGKCLNL PEYSVLRRRW |
| hrv-91 | KNTQDHVRSL CMLAWHSGEE EYKNFTEKIR STNIGKCLLI PEYSVLRRRW |
| hrv-92 | RNTQDHVRSL CMLAWHSGQK EYDEFLSKIR TTDIGKCLNL PEYSVLRKRW |
| ef173425-93 | KNTQDHVRSL CMLAWHSGEK EYDKFVQGIR STDIGKVLVI PPYSVLRHRW |
| hrv-97 | KNTQDHVRSL CMLAWHSGEK EYDEFVRGIR STDIGKVLMI PPYSVLRHRW |
| hrv-99 | KNTQDHVRSL CMMAWHSGES EYNKFVDGIR STDIGRVLLI PSYSVLRRRW |
| | 2251 |
| annotation | HHHF. |
| af499637-cva13 | LDSF. |
| af546702-cva21 | LDSF. |
| v01149-pv1m | LDSF. |
| d00239-01 | YEKF. |
| pico-01 | YEKF. |
| hrv-01 | YEKF. |
| x02316-02 | YEKF. |
| hrv-07 | YEKF. |
| dq473503-07 | YEKF. |
| hrv-08 | YEKF. |
| pico-09 | YEKF. |
| hrv-09 | YEKF. |
| hrv-09-f01 | YEKF. |
| hrv-09-f02 | YEKF. |
| dq473498-10 | YEKF. |
| hrv-10 | YEKF. |
| ef173414-11 | YEKF. |
| ef173415-12 | YDKF. |
| hrv-13 | YEKF. |
| hrv-13-f03 | YEKF. |
| dq473493-15 | YEKF. |
| l24917-16 | YEKF. |
| hrv-18 | YEKF. |
| hrv-19 | YEKF. |
| hrv-20 | YEKF. |
| hrv-21 | YEKF. |
| hrv-22 | YEKF. |
| dq473497-23 | YEKF. |
| hrv-24 | YEKF. |
| ef173416-24 | YEKF. |
| hrv-25 | YEKF. |
| dq473508-28 | YEKF. |
| hrv-29 | YEKF. |
| dq473512-30 | YEKF. |
| hrv-30 | YEKF. |
| hrv-31 | YEKF. |
| hrv-32 | YEKF. |
| hrv-33 | YEKF. |
| hrv-34 | YEKF. |
| dq473501-34 | YEKF. |
| dq473505-36 | YEKF. |
| hrv-38 | YEKF. |
| dq473495-38 | YEKF. |
| ay751783-39 | YEKF. |
| hrv-40 | YEKF. |
| dq473491-41 | YEKF. |
| hrv-43 | YEKF. |
| dq473499-44 | YEKF. |
| hrv-45 | YEKF. |
| dq473506-46 | YEKF. |
| hrv-47 | YEKF. |
| dq473496-49 | YEKF. |
| hrv-49-f04 | YEKF. |
| hrv-50 | YEKF. |
| hrv-51 | YEKF. |
| dq473507-53 | YEKF. |
| hrv-54 | YEKF. |
| hrv-54-f05 | YEKF. |
| dq473511-55 | YEKF. |
| hrv-56 | YEKF. |
| hrv-57 | YEKF. |
| hrv-58 | YEKF. |
| dq473500-59 | YEKF. |
| hrv-60 | YEKF. |
| hrv-61 | YEKF. |
| hrv-62 | YEKF. |
| hrv-63 | YEKF. |
| hrv-64 | YEKF. |
| ef173417-64 | YEKF. |
| hrv-65 | YEKF. |
| hrv-66 | YEKF. |
| hrv-67 | YEKF. |
| hrv-68 | YEKF. |
| hrv-71 | YEKF. |
| dq473492-73 | YEKF. |
| dq473494-74 | YEKF. |
| dq473510-75 | YEKF. |
| dq473502-76 | YEKF. |
| hrv-76 | YEKF. |
| hrv-77 | YEKF. |
| hrv-78 | YDKF. |
| ef173418-78 | YDKF. |
| hrv-80 | YDKF. |
| hrv-81 | YEKF. |
| hrv-81-f06 | YEKF. |
| hrv-81-f07 | YEKF. |
| hrv-82 | YEKF. |
| dq473509-82 | YEKF. |
| hrv-85 | YEKF. |
| pico-85 | YEKF. |
| dq473504-88 | YEKF. |
| a10937-89 | YEKF. |
| hrv-89 | YEKF. |
| hrv-89-f08 | YEKF. |
| hrv-89-f09 | YEKF. |
| m16248-89 | YEKF. |
| hrv-90 | YEKF. |
| hrv-94 | YEKF. |
| ef173419-94 | YEKF. |
| hrv-95 | YEKF. |
| hrv-96 | YEKF. |
| hrv-98 | YEKF. |
| hrv-100 | YEKF. |
| ef186077-qpm | IDKFI |
| ef077279-nat001 | IDKFI |
| ny1078 | IDKFI |
| ef582385-c024 | IDLFI |
| ef077280-nat045 | LDLFI |
| ef582387-c026 | IDKFI |
| ef582386-c025 | IDKFI |
| dq473485-03 | LDLF. |
| ef173422-03 | LDLF. |
| dq473490-04 | LDLF. |
| hrv-05 | LDLF. |
| dq473486-06 | LDLF. |
| l05355-14 | LDLF. |
| k02121-14 | LDLF. |
| ef173420-17 | LDLF. |
| hrv-26 | LDLF. |
| hrv-27 | LELF. |
| ef173421-27 | LELF. |
| dq473487-35 | LDMF. |
| hrv-35 | LDMF. |
| ef173423-37 | LDLF. |
| hrv-42 | LDLF. |
| dq473488-48 | LDLF. |
| hrv-52 | LDLF. |
| hrv-52-f10 | LDLF. |
| ef173424-52 | LDLF. |
| hrv-69 | LDLF. |
| dq473489-70 | LDLF. |
| hrv-72 | LDLF. |
| hrv-79 | LDMF. |
| hrv-83 | LDMF. |
| hrv-84 | LDLF. |
| hrv-86 | LDMF. |
| hrv-91 | LDLF. |
| hrv-92 | LDMF. |
| ef173425-93 | LELF. |
| hrv-97 | LEMF. |
| hrv-99 | LDLF. |

ANNOTATION
HRV protein beg-end positions (cleavage sites) within this alignment.
0001-2255 polyprotein
0001-0069 VP4
0070-0345 VP2
0346-0587 VP3
0588-0919 VP1
0920-1068 2A
1069-1167 2B
1168-1499 2C
1500-1586 3A
1587-1609 3B
1610-1792 3C
1793-2255 3D
Structure features, where known are indicated on annotation line:
H = helix,
B = beta,
P = puff,
K = knob.
If structure reference has assigned letters to designate sheets or helices, these are indicated on this line.

The application's sequence listing, which the Patent Office published only in electronic form, follows.

SEQUENCE LISTING (86 sequences)

SEQ ID NO: 1 - RNA, 7137 nt, Human rhinovirus
uuaaaacuggguguggguuguucccacccacaccacccaauggguguuguacucuguuauuccgguaacuuuguacgccaguuuuucccuccccuccccauccuuuuacguaacuuagaaguuuuaaauacaagaccaauaguaggcaacucuccagguugucuaaggucaagcacuucuguuuccccgguugauguugauaugcuccaacagggcaaaaacaacagauaccguuauccgcaaagugccuacacagagcuuaguaggauucugaaagaucuuugguuggucguucagcugcauacccagcaguagaccuugcagaugaggcuggacauuccccacugguaacagugguccagccugcguggcugccugcgcaccucucaugaggugugaagccaaagaucggacagggugugaagagccgcgugugcucacuuugaguccuccggccccugaaugcggcuaaccuuaaaccugcagccauggcucauaagccaaugaguuuauggucguaacgaguaauugcgggaugggaccgacuacuuuggguguccguguuucacuuuuuccuuuauuaauugcuuauggugacaauauauauauugauauauauuggcaucaugggcgcccagguaucuagacaaaauguugguacacacucaacccaaaauucagugucaaauggaucaaguuuaaauuacuuuaauauaaauuacuucaaggaugcugccucaaguggugcaucuagauuagauuucucucaagauccaagcaaauucacugacccaguuaaagaugucuuagaaaaggggaucccaacacuacaaucaccaucuguugaggcuuguggcuauucagacaggauuaugcaaauaaccagaggagauucaacaaucacaucucaagauguagcaaaugcugugguuggguauggggucuggccgcauuacuuaacaccacaagaugccacugcuauagacaaaccaacacaaccugauacaucaucaaauagauuuuauacacuagagaguaaacauuggaaugguaguucaaaaggauggugguggaaauuaccagaugcucuuaaagacauggguauuuuuggagaaaauauguauuaucauuuccuggguagaaguggauauacaguucaugugcaguguaaugcuaguaaauuccaucaggguaccuuguuaguugcaaugauaccagaacaccagcuagcaagugcaaaacacggaagugugacugcugguuacaaacucacacacccaggugaggcuggcagagauguaagucaagaacgugaugcaaguuuaagacaaccuagugaugauaguuggcuuaauuuugauggcacccuucuuggaaauuuauuaauuuucccacaucaauuuauaaaccuuaggaguaauaauucugcaacucuaauaguaccauauguaaaugcugugccaauggauucaaugcuucgacauaauaacuggagccuggucaucauaccaauuaguccauuacguagugaaacuacaucuucuaauauagugccaaucacuguaucaauaagucccaugugugcugaauuuucuggugcaagagcaaaaaacauuaaacaaggauuaccuguauauauaacuccaggaucugggcaauucaugacuacugaugauaugcaaucaccuugugcacuacccugguaccauccuacuaaagaaauaucuauuccgggugaaguuaaaaaccuuauagaaaugugucaaguugauaccuugauuccagucaauaauguggguaacaauguuggaaaugucaguauguacacuguacaacuagggaaccaaacaggcauggcacaaaaagucuuuucaauaaaaguagacauuacaucacagccuuuggcuacaacuuuaauuggggagauugcaagcuauuacacccauuggacuggcagucugcgauuuaguuuuauguuuugugggacugcaaacacaacacuuaaauuauuacuugcauacacaccaccugguauugaugaaccaacaacuagaaaggaugcaaugcuagggacacauguugugugggauguuggauugcagucuacuauaucucuuguuguaccaugggugagugccagccacuucagguuaacugcagauaauaaauacuccauggcugguuauaucacauguugguaccaaacuaauuuaguagugcccccaaguacgccacagacugcugauaugcuguguuuuguuucugcauguaaagauuuuugucuacgaauggcaagggauacagauuuacacauacaaagugguccaauagagcaaaauccaguagaaaacuacauugaugaaguuuuaaaugaaguuuuaguagugccgaauauaaaagaaagucaucacacuacaucaaacucugccccacuuuuagaugcugcagagacgggacacaccaguaauguucaaccagaagaugcuauagagacaagguauguuauaacaucacaaacaagagaugagaugaguauagaaaguuuccuugguagaucugguuguguccacaucucaagaauaaagguugauuacacugacuauaauggacaggacauaaauuucacaaaauggaaaaucacacuacaggaaauggcacagauuaggagaaaauuugaauuguuuacauaugucagguuugacucagaaauaaccuuggugccuuguauugcugguagaggagacgacauuggacauauuguaaugcaauauauguauguuccuccaggagcuccaauuccuucaaaaagaaacgauuucucauggcaaucaggcaccaauaugucaauauucuggcaacauggacagccauuuccuagauuuucuuuaccauuucuuagcauugcaucagcuuauuauauguuuuaugauggauaugauggagacaacacuucuuccaaguaugguagcguaguuacuaaugauauggguacuauaugcucaagaauaguuacagaaaaacagaaacauucuguugucaucacaacacacauauaucauaaagcuaaacacacaaaagcuugguguccuaggcccccuagagcugucccuuacacacauagucaugugacuaauuauaugccagaaacaggugacgugacaacagccauaguccgcagaaacacuauaacaacugcugggcccagugaucuauaugugcauguagguaacuuaauauauagaaacuuacaucuguucaauucugaaaugcaugauucaauuuugauuucauacucuucugauuuaaucauauaccgcacaaacacuauaggugaugauuauauucccaauuguaacugcacugaggcuacuuauuauuguagacacaaaaauagguauuacccaauaaaaguuacuccacaugauugguaugaaauacaagagagugaauauuaccccaaacacauccaauacaaccuauuaauuggugaaggaccaugugaaccuggugauugugguggaaaacuucuuuguagacauggugucauuggcauaaucacagcagguggugaaggucauguagcauuuauagaucuuagacaauuucacugugcugaggaacaaggcauaacugauuacauacacauguugggagaggcuuuuggcaaugguuuuguagauaguguuaaagaacaaauaaaugcaauaaauccaaucaauaacauuaguaagaagguuauuaaguggcuacuuagaauaaucucggcuaugguuauuauaaucagaaacuccucugacccucaaacgaucauagcaaccuugacacuaauugguugcaaugguucaccauggagauuucucaaagaaaaguuuugcaaauggacccaauuaacuuauauccacaaagagucugauucauggcuuaagaaauucacugaaauguguaaugcugcacguggucuugaauggauugguaauaaaauuucaaaauuuauagauuggaugaaaucuaugcuaccccaggcccaauugaaaguuaaauacuugaaugaaauaaagaaacucaguuugcuugaaaaacagauugaaaaucuacgugcggcagauagugcaacacaagagaaaaucaaaugugaaauugacacccuacaugaucuaucgugcaaauuucuuccuuuguaugcacaugaggcaaaaagaaucaaagugcuuuauaauaaauguuccaauauaauuaaacaaagaaagagaagugaaccgguggcggugaugauacauggaccacccgguacugguaaaucuauaacaacuaacuucuuggcuagaaugauaacaaaugaaagugauguguacucauuaccuccagaucccaaauauuuugaugguuaugacaaucagaguguuguaaucauggaugauauuaugcaaaauccagauggagaagacaugacacuauuuugccaaaugguuucaaguguuacauuuauaccacccauggcugauuugccugacaaggguaaaccauuugauucaagauuuaucuuauguaguacuaaccacucgcuuuuagccccaccuacuauaucuucauuacccgcaaugaauagaagauuuuucuuugacuuagauauuguaguucaugacaauuauaaagauacacaagggaaauuagauguauccaaagcuuuucgaccuuguaauguuaacaccaaaauuggcaaugcaaaauguuguccauuuguaugugguaaggcagugwcauucaaagaucgcagcacuugcucaacauacaccuuagcucaaguuuacaaucacauuuuggaagaagacaaaagaaggagacaggugguggaugucaugucugcaauuuuccaaggaccaauuucuuuagacgyuccaccaccaccagcuauagyagaucuguuacaaucaguuagaacaccugagguaaucaaguacugucaagauaauaaaugggucauuccagcagagugccaaguggaaagagacuuaaauauagccaauagcauaauagcuauuauagcaaauauaauaaguauagcuggcauuauauuuguaauuuauaaauuguuuuguucauuacaaggaccauacucaggugaaccuaaaccuaaaaccaaaguaccugaaagaagaguaguugcucaagguccagaagaagaauuuggaaggucaauucucaaaaacaauacuugugugauuacuacagguaauggaaaauuuacaggucuugguauacaugacagaauucuaaucaucccaacacaugcugauccagguagagagguccaaguuaaugguguccacacuaagguucuagacucauaugaucuuuauaauagagauggaguuaaacuugaaauaacggucauacaauuagauagaaaugaaaaauuuagggacauuagaaaguauauaccugaaacagaagacgauuauccagaaugcaauuuggcacuuucagcuaaucaagaugaaccaacuauaauuaaaguaggagauguaguguccuauggcaauauuuugcuuaguggaaaucaaacagccagaaugcuuaaauauaauuaccccacaaaaucaggguauuguggagggguacuauauaaaauuggucaaauucuagguauucauguggguggaaauggaagggaugguuuuucagcuauguuacuuagaucauacuuuacagauacucagggccaaauuaaagucaauaagcaugcuacugaauguggucuuccaacuauacacacuccuagcaaaaccaaacuucagccuaguguauuuuaugaugucuucccaggcucuaaggaaccagcugugcucacagauaaugacccuagauuggaaguuaauuuuaaagaagcuuuauuuucuaaauauaaagguaauguggaauguaauuugaaugaacauauggaaauugcuauugcccauuacucagcacaauuaaugacacuagauauugauuccaggccaauagcauuggaagauagcguguuugggauagaaggacuugaggcuuuagaucuaaacaccagugcaggguuuccuuaugucacaauggguauuaaaaagagagauuuaauaaauaacaaaacaaaagauauauccaggcuuaaagaggcucuagauaaauauggaguugacuuacccaugaucacuuucuuaaaagacgagcuuaggaaaaaggagaaaauuucaacagguaaaacuagaguuauagaagcaaguaguauaaaugacacaauauuauuuagaacuacuuuuggcaauuuguucucuaaguuucauuuaaacccaggcguuguuacuggcucugcaguagggugugacccugagacuuucuggucuaaaaucccaguuaugcuugauggagauuguauaauggcuuuugacuauacaaauuaugaugguaguauacacccugucugguuucaagcucugaaaaaaguucuugaaaauuuaucuuuccaaucuaauuuaauugauagauuguguuauuccaagcacuuguuuaaaucaacauauuaugaaguggcagguggaguuccuucuggguguucuggaaccaguauauucaauacuaugauuaauaacauuauaauaagaacacuaguucuagaugcauacaaaaauauugaucuggacaagcuuaaaauaauugcauauggugaugaugugauuuucucuuauaaauauacucuagauauggaagcuauugcuaaugaaggaaagaaauauggacuuacaauaacaccagcagauaaguccaaugaauucaagaaacuugauuauaguaaugugacuuuucuuaaacgugguuuuaagcaagaugaaagacauacauuccuuauucauccuacauucccaguggaagagauacaugaaucaauuagauggaccaagaaaccuucacagaugcaagaacaugugcuaucauuaugucaccugauguggcacaauggacguaagguguaugaagauuucucuaguaagauacgcagugucagcgcuggacgugcacuguauaucccaccuuaugaucuguugaaacaugaaugguaugaaaaauuuuagauauagaaauaaugaaugaaugauucuuuaauucuau

SEQ ID NO: 2 - RNA, 7212 nt, Human rhinovirus
uuaaaacagcggguggguaucccaccacccgacccacugggugugguacacugguacuuuguaccuuuguaugccuguuugcuuccacuccccuuuaccuaauauucuuccccaaguauauuuugcgguaacguuagaagaagcaaaguuagugcaauaggauguaucacaaccagugguauaaagcacaagcaauucuuguuccccggagcuggauauagacugcuaacguggucaaaaguccuuaaccguuauccgccagcuaacugcgagaagacuaguaacaccauguuuguuuuuagacguucgaucaggugaauaccccauucacuaguuuggucgaugaggcugagaauaccccacagguaacugugucucagccugcguggcggccaacccgacucaugucgggacgccuacuaauagacauggugugaagauccuauugcgcuuaguugugaguccuccggccccugaaugcggcuaacccuaaccccggagccuugugguguaaaccaacauuugcaaggucguaaugaguaauucugggaugggaccgacuacuuuggguguccguguuuccuuuauuuuuauugugugugucuuaugguuacaaauacaauuuguaaucaugggugcacagguuucaacacagaagagcggcucucaugaaaaccaaaacauacucaccaaugggucaaaucaaacauucacagucauaaauuauuacaaggaugcagcuaguucauccucagcaggacaaucauuuucaauggacccaagcaaauuuacugagccaguuaaagacauaauguuaaagggugcaccugcacuaaauucaccaaauauagaagccugugguuacagugauagaguagaacaaauaacacuaggaaacucaacaaucaccacacaagaagcagcaaauucaauuguugccuauggugaauggccauccuucuuaucggauguugaugcaagugaugucaauaaaacgacaaaaccagauacuucagcaugcagauuuuacaccuuggauaguaagauguggacucagggaucaaaaggcugguguuggaaauuaccagaugcacuuaaagauaugggcauauuuggucaaaauauguuuuuccacucucaggguagaacuggguauaccauucaugugcaguguaaugcaaccaaauuccauagcgggugcuuguuaguaguaguaauacccgaacaucagcuugcuucagcagagggugguaacgugucaguucuuuaugacaaaacacauccgggagagaaggguauagaucuuagugaagcagauucaacaggcccaaugaaagacccccucuacaugauggaugguacauugauuggaaauagucucauuuuuccacaccaauuuauaaacuugaggacaaauaauacagccacaauaguagucccuuacaucaacucaguacccauggauuccaugacccgacauaauaaccugucuuugaugguaaucccuauuguagacaucacugcaacaagugguacaacucccucuauaccaguaaccauaaccauugccccaauguuucuagaauugucuggcauacgaucaaaggcugugauccaaggucuucccgcaguuuuaacaccaggcucagagcaguuucuaaccacagaugacagacagucacccagugcaaugcccaauuaugaaccaacaccauuaauacacauuccuggagagguaaaaaaucuacuggaaauugcacaaguugauacacuaauaccuuuaaauaauacaaccaacacaacuggcuuaggaauguauagaaucccgcuugugcaaaauaugcagggagaacaaguguuuggcuucagauuguaccugggggaugguguuuuaaagacaacacuauuaggugaacuaugucaguauuuuacucauugggcaggcucucuacgcuuaucauucauguacacugguccagcacuaucuagugcuaaguuacucauugcuuauacaccuccaggagcacaaggcccaacaaagcguaaagaagcaauguugggaacacauguaguuugggauauuggguuacaaucaacaguaguauuaaauauaccauggaccucaggagugcaauacagauauacagauccagacacauauacuagugcagguuuuguuucauguugguaccagacuucacuaguauuacccccacagacacaacagacuguguauaugcuaggcuuuaucagugcauguccagauuucaagcucagacucaugaaagauacucaaucaauacaucaggaaacagcguuaacugagggcuuggaggaugacuugguagaagucauuguugacaaagcgcaacaaacauuggcuucaauuaagagugauuccaaacacacacagaaagugccuucauuaacugccaaugaaacuggagcaacauuaccaacaacaccaucugauaguguugagaccagaacaaccuugaugcacuacacaggaucagaaacaacauuagagaacuuuuugggcagggcugcauguguacauguuguugaaauugugaacaagcgccccacagauacagaggaacacagaaugcaacucuuguuuaauaauuggaaaauaaauuuguccagucuggugcaacuuagaagaaaguuagaaauguuuacauauguuagauuugauucugaauacaccauaauagcuaccaguucacaaccaaaugaagccaaauucucuagcaaucuaaccauucaggcaauguucaucccaccaggugcaccaaaucccaaaaagugggaugauuacacauggcaaagugcaaccaaccccaguguauuuuucaacguggggaagucagcuagauuuagcgugccauacuuaggaauugcuucugcuuacaacuguuucuaugauggauacucucaugauaauucuacaacaccauauggaauuaauguucuuaaccacauggguucaauggcuuuuagaguaguuaaugaacaugacaaucacaccacacaugucaagguuagaguuuaucacagggccaaacauauuagagcauggguacccagagccccuagagcacuagaauacuugcauauuggcaggacaaacuacaaacaaagcccccagaacccuauuaaaaccagaaaaacuauuaguacauacggauuaggacccagauuugguggaguauguacugguaauauuaaaauaaugaacuaucaccuuaugacacaugaggauaaucuuaaccucgugacacccaugccugaaagagaucuagccauuaucaacauaggugcucauggcucagaaacugucccucacugcaauugcacaucaggaguuuacuuuuccagguacuacaacaacuuuuacccuguaauuugugaaaaaccaacauguuuguggaucgagggaaacaauuacuauccuagcagauaucagcagggaguuaugagaggaguugguccagcggaaccaggugauuguggagguaucuuaagaugcguccaugguccuauuggacuccugacugcaggugguaguggcuauguuugcuuugcugacaucagagcguuagauuuauucaaagcugaguaccaagguauuucagacuacauccugaauuuaggaaaagcuuuuggaucuggauuuacagagcacauuagugaaaaggugacagaauugcaaaauauuucaauggguuacuuaaacacaaaaguccuguccaagauaguaaaaauuguaucagcuuuaguuauaauuuguagaaaccaugaugaccuaauuacuguuacagcuacauuagcacuauugggaugugaugggucaccauggagauauuuaaaaauguacauaaguaaacauuucugcuuaccuuacauagaaagacagucuaaugauuugugguuuaagaaguuuaaugacauguguaaugcagcaaagggucuugaauggauugcaaacaaaauuucuaaacuuauugaaugggucaaacagaaaauuuuaccacaggcaagagacaaacuagauuucugcaggaggcucaagcaguuagacauuuuggagaggcaaauagacacauugcauaugaaccagguuaaugauaaugacagagaaguguuguuuaacaacauauugugguuggaacaaaugucucagaaauuugcaccacuguaugcaguugaagcaaagagaauuaaaacacucaagaauaagaugacuaauuucauacaguuuagaucaaaacaccgcacagaaccuguguguguguuggugcauggcucgccuggcucaggcaagucacuaaccaccuccuuaauugguagggcuauugcagacaacugugguucaucuguguauucauugcccccagacccaaaacauuuugauggauaucagcaacaggcuguagugauacuagaugauuuaaaucaaaauccaaauggagaagauauuaguacuuuuugccaaaugguuucaucaguugauuuuauucccccuauggcaaaucuagauaacaaggguauguuauuuacuaguaauuuuguguuagcauccacaaacucucaaaccuugaacccaccaacaguacuuaauccugaagcacuagcacguagauuuggauuugaucuggauaugugccuacacaccacauacacaaaaucagguaaacuaaauacugcucuggcuucagaauuauguaaggauugucauaaaccaacaaauuuuaagagaugcugcccucuaauuuguggcaaagccuuaagcuugguugacagacgcacaaauguuagauacaguauagaucaauuggucaccgccauuauaacugagcaugcaaauaaaacaaaaauuuccaguucauuagaggcauuguuccaagggccaguguauaaagaccuaucuauagauauaacaaccacaccacccccagaguguauaguugauuugcucaaaucuguggacaaugaagagguuagacaauauugucaagaaaagagguggcuuauuccugagauuccaaccaauauugauagagcaguaaaccaggcaacuaguuuaauuaacaccauucuaauguuuaucacuacacuugguauaguuuauaugauauacaaacuuuuugcacaaacucaagggccauauucaggucuagacaacaaaucuaaguugaagccuccaacacucagggcaguaguaacacaaggaccuaacacagaauuugcuuugucuuuacuaaggaaaaauauaguaacagugacuacugauaagggagaguuuacaggauuggggauauaugaaagaguauuagugauaccaacccaugcacaacccucagaucaaguguugaucaauggcuuugcuacuaagauuaaagauaaauggaaguuaguggauccagacaaccuaaauuuggagauuacuguuuuggaauuggacagaaaugaaaaauucagagauauuagaauguuuauugcagaugauccagaguguaacgaagccucacucgucauacauucaaauaauuuuaaagauaccauuuuaucuguugggacaacuacacuagcugguauuauaaauuuaaguaacacacccacugcacgaaugauucgcuaugaguucccuaccaaaacaggacaaugugguggugucuugugcucaacaggaaaaauauauggaauacaugugggugguaaugggaagcaaggauucucagcacagcuuaagaaacaguauuuuguacaaaaacagggucaaauuaucacaaaaagaaauguuagagaauuggauauuaaaccuaucaacaccccaagcaaaacaaagcuccaccccaguguguuuuauaauguauuuccuggaaguaaggaaccagcuguccugcauccugcagaugagcgauuggagguuaauuuugaggaguccuuauuuuccaaauacaaggguaauauagaaagugaaauuacugaaaacaugaagguagccauugaucauuaugcuggucaacucuugucauuagauauuccaacacaagaacuuacucuuaaagaagcccucuauggcacagauggacuggaaccaauagaucuaaacacuagugcaggauacccauauguuaguuuagggauuaaaaagagauccauuuuaaauaaagaaaccaaagacacaucaaaaauggaggaaugccuaagcaaauaugguauugauuugccauuaguuacauacauaaaggaugaacuuagagguaaagacaaaaucaggcuggggaaaagcagauuaauagaagcauccaguuuaaaugauucaguuaauaugaggguuaaguuagguaauuuguauaaggcuuuccacaaaaauccaggaauauuaaccgguucugcugucgguugugauccagauacuuucuggucuguuauaccaugucugcuagauggggaguuaauugccuuugacuauucaaauuuugaugcuagucuuucaccaguuugguuuaagugucuggaacaagucuuaaagaaaauaggguuucaauguucagaacuaauccagcaaauaugcacuacccaucauauuuuuaaagaccaaauuuauacuguugaaggaggaaugccaucuggaugcucuggaaccaguaucuuuaauucaaugauuaauaauauaauaauuaggacucuaauauuagauguuuacaaagguauagauuuagacucauuaagaauaauagcauacggugaugauguuauuauuucauacccuuuuccauuggacccagagaaaauugcagaacaaggagccauuuauggcuugacuaucacaccaccagacaaaucuccuaaauucacaaaaauggauuggaauacaguaaccuuuuuaaaaagacauuucaaaccagauagugaauucccauuucuuguucacccaguaaugccaaugacagauauucaugaaucuaucagauggacaaaagaucccaaaaauacucaagaucaugucagaucauugugcaugauggcauggcauucaggugaagaugaauacaauaaauuugugaauggaaucagaagcacugaaauuggaaaggcauugcuaauuccuucuuauucuguucuuaggcacagauggcuugauuuguuuuaauuuuaauauauagaguauuaauuuaguguagugaauuuuuccucuau

SEQ ID NO: 3 - RNA, 7146 nt, Human rhinovirus
uuaaaacugggaguggguuguucccacucacuccacccacguggugcuguacacuguuauuccgguaacuuuguacgccaguuuuucccucccuucccucauuauguaacuuagaagcaugaacauauggaccaauaggcaauaaucauccagauuauugaaggucaagcacuucuguuuccccggucaauaaagauaugcuuuacccaaggcaaaaacuuuugagaucguuacccgcacaucaacuacgcaaagccuaguaucaccuuugauguacuaagacuggucguuuccugcaaccccagcaguagaccuggcagaugaggcuggacguaccccacuggcgacagugguccagccugcguggcugccugcucgcccauaugggcgagaagccuuauuauugacaaggugugaagagccgcgugugcuuggugugaguccuccggccccugaauguggcuaaccuuaacccugcagccauugcucauaauccaaugaguuaguggucguaaugcgcaagugcgggaugggaccaacuacuuuggguguccguguuucuuauuuuucuuucauguguguuauauggugacaauuuauaguauauaaguugucaucaugggcgcacaaguaucuagacaaaauguugguacacacucaacucaaaaugcagugacuaacgguucuagccucaauuauuucaacaucaacuauuucaaagaugcugccucaaguggagcauccagauuagauuuuucccaagauccuaguaaauuuacugauccugucaaagauguguuagagaaaggaaucccaacacuccaaucaccaacaguugaggcuugugguuacucagacagguugaugcaaaucacccguggagauuccaccauaacaucccaggauauagcuaaugcaguaguugguuauggcguguggccgucauauuuaacaccugacgacgcuacugccauugacaaaccaacucaaccggauacuucuuccaacagauuuuacacucuggauagccguaccuggacaucugccucauuaggguggugguggaaauuaccugacgcucuuaagaauaugggcauauuuggagaaaauauguuuuaucacuuuuuggggagaucaggauauacuauacauguacaauguaacucuagcaaguuucaucaaggcuuauugauuguugcugcuauaccugaacaccaacuagcaucagcagucaaaggaaauguuucagugggguauaagcacacucauccaggugaacaagguagagaaauaucuucagagcguagaacugaugaugauagaagacccagugaugauaguuggcuaaauuuugauggaacucuacuugguaauuuaccuauauauccucaccaauauauuaaccugagaacuaacaauucagccacucucauccuuccauacauuaaugcaguuccaauggauucuaugcuuagacauaacaauuggaguuuagugauaauaccuauauguccucuucaaguugagucaucagguacaccaacuguaccuauaacagugucaauuaguccaauguuuucugaauucucagggccuaggaacaaaguugucuuuacccaaggcuugccagugaugcuuacaccaggaucuggucaauuuuugacaacagaugauacacaaucuccaucugcauuuccauacuuucauccgacuaaggaaauauuuauaccugggcaaguuagaaacuuaauagaaaugugucagguugauacacucauccccaucaauaauacgggaaauaauguaagaucagcaaauauguacacuguugauuuaacuacacaagaucauccauaugcacaagaaguuuuugcuauaccuguugauguugcuucacacccauuagcaaccaccuaucuuggggaaaugaguaguuacuuuacacacuggacugggaguuuacgauuuagcuuuauguuuugugguucugccuguacaacacuuaaauuauugauagcauauaccccucccggaauugcaaaaccaacauccagaaaagaggcaaugcuugguacacaccuagugugggauguuggacuccagucaacagccucacuuguagugccaugggucagugcaagucauuuuagauucacuaccccagauacauacucagcagcugguuauaucacaugcugguaccagacaaauuuuguagugccuccaaacacaccaagaagugcaaagauggucugcauggugucagcuugcaaagacuuuugcuugcgauuggcuagagauacuaauuuacacaugcaggaggguguacuugaacaaaacccgguagagaauuauguagauagcuuacuaaaugaaguauuagugguaccuaauauucagccaaguacaucuguuucaagucacucuguaccagcauuggaugcugcagagacuggacauacuaguucuguucaaccugaagauaugaucgagacaagguaugucauaacagaccaaacaagggaugaaacuaguauagagaguuucuuagguagaucuggauguauugcuaaaguuaaacuugacacaacacagggugacuaugacacaggcaaagguguugguuucacuacauggaaaaucagcuuacaagaaauggcacaaaucagaagaaaguuugaacuauucacauacacuagauuugauucugagauaacaauagucacagcagcagcagcacaagguaaugauauuggacauauaguuaugcaauuuauguauguaccuccaggggccccaguuccaauaaaacgcgaagauuauacauggcaaucaggaacaaaugcuucuauauuuuggcaggagggucaaccauacccuagauucacaauuccuuuuaugaguauugcaucagcuuauuauauguucuaugauggauaugauggugaugaugcgucauccaaauaugguuccguaguaaccaaugacaugggaaccauauguguuagacuaguuacaucuacacaaaaacacaauuuaaagauugugagucgcauuuaccacaaagccaaacauauaaaagcauggugcccacgcccaccacgagcugugccuuaucaacacacucacuccaccaacuaugugccacaaaauggagaggucgcaacucaaaucaaaaccagagccaaucuuuucacccucaaaucagcuggucccucuaguauguauguacauguggguaaucuaauauauagaaaccuccauuuauuuaacucugagcuucaugauucuauucuugugucuuauucuagugauuuaaucauuuaccgaacaaacacugaaggugaugauguaaucccuaauuguaauuguacugacuguacauauuacuguuaucauaaggauagauacuuuccaauuaaaguuacugcucaugauugguaugaaauucaagaaucugaauauuacccaaaacauauccaauacaacauuuuaauuggagagggaccuugugaaccaggagauuguggaggaaagcuguuauguaaacauggagucauuggcauaguaacagcugggggugagggucauguugcuuucaucgacuugaggaaauuucaaugugcugaagaacaaggaaucucugauuauguagaacaccuuggucaaguuuuugguguuggcuuuguggacaguauaaaacaacaaguaaauuuuauuaaucccaccaguaaaauuggcucaaaagugauuaaaugguuauuaagaauagucucagcuaugauuauaaugguuagaaauaguucugauccucaaaccauaguugcuacucuuacccuacuagguuguucagguucaccauggagauuuuugaaagagaaauuuugcucguggcuucaauuaaauuacauacauaaagaaucugauuccuggcucaagaaauuuacagaagcaugcaaugcugcucgugggcuagaguggauuggucaaaagaucucaaaguuuaucgauuggauaaagaguauguuaccacaagcccaauuaaaaguagaauauuuaaauaaacuuaaacagcuuaaucuccuggaaaaacaaauugagaccauuagacuugccccgaccuguaaucaggagaaaauuuuuugugauauaaacacucuucaugauuuaucccuuaaauucuugccacuguaugcaucugaagcacguagaauuaagaaucuuuauaauaaauguaauaauguuauuaaaggagggaaaagaaaugaaccaguugcugugcuuauacauggauccccugguacuggaaaaucgcuugcaaccucuguccuugcucgaauguugacuguugagacugauauauacucucuaccuccagauccaaaauacuuugaugguuaugaucaacaaaguguugucauuauggaugacauuaugcaaaacccaaauggugaagauaugacauuauuuugucagauggucucaagugugcccuucauaccgccaauggcugaucuuccagacaaaggaaaaccauuuacaucaaaauuugugcuugcaaguacuaaucauacucuucucacaccaccaacugugucaucauuaccagcuaugucaagaagauuuuauuuugauuuagauauucaaguuaagaaagauuaucuuguagaugggaaauuggauauagccaaaaguuucaaaccaugugauguuaauaauaaaauagguaaugcaaaauguuguccauuuauauguggaaaagcuguggaauucaaagauagaaauacaugugcuguauuaucuuuaucucgacuguauaaucacauuagagaagaggauagaaggagaagcagcgcagcccaagcaauggaggcuauauuucaagguauagaucuucacacaccaccuccaccagccauaacugaucuucuuagaucuguuagaacuccagaaguuguuaaauauugucaagauaauaauuggauuguuccagcugaauguacuauagaaagggaucuaggauuagcaaacuuaaccauaaguauaauagcuaacguaguuucaauaguggguaucauuuauauaauuuauaaguuauuuugcacucuacaaggcccauacucaggugaacccaaaccuaagacaagagcuccugagagaagagucgugacccaagguccagaagaagaguuuggccguucacuaauuaaacauaacuguuguguugugacaacugauaaggguaaauucacuggucuugguauuuacaaccaaauuaugguucuuccuacacauucugauccaggaucugagauuuugauagaugguguuaaaguuaaaauucuagacuccuaugaucuacauaaccaugaaggaauuaaauuagagauuacaguuaucaaauuagaccgcaaugagaaauuuagagauauuagaaaauacuugcccacccgugaugaugauuaccucggaugcaaucuugcuuuauuggcuaaucaggaugaaccaacaauuuuaaauguaggagaugcaauuucuuaugguaauaucuuguugaguggcaccaacacagcacgaaugauuaaauaucacuauccaacaaaagccgguuuuugugguggugucuuguacaaaguugguucuauucuuggcauacauguaggugguaaugguagagauggauuuucugcaaugcucuuacaaucuuacuuuucugaaacacaagguuuaauaacuaaagaauuaccugugucaaguaaaaauuuaccaucuauucauguuucauccaaaacacgcuuacaaccuaguguauuuuaugaugucuuuccuggaacaaaagaaccugcuguuuuaaguagcaaugacccuagacuagaaguugauuuugauucagcauuauuuuccaaguauaaagggaauguuaauugucaauugaccccacauauggagauagccguugcgcauuaugcagcacaguuaucaacauuggauauaaauccucaaccucucucacuagaagaaaguguguuugggauagauggacuugaagcuuuagauuuaaauacuagugcagguuuucccuaugucucauuaggaauuaaaaagaaagaucuuauagauaagaaagcaagagauauuucaaaauuaagaaaggcaauugauaaguaugguauugaccugccuauggugacuuuuuuaaaagaugaacuccgaagaaaggagaagauuaaagaaggcaagacuagggucauagaagcaaauagugucaaugauacuguagucuuuagaaguacauuuggcaaccucuuuuccacguuccauaaaaacccagguauagugacuggaucugcaguaggaugugacccagaagucuuuuggucaaccauacccuuaauguuagruggagaauguuuaauggcuuuugauuacucaaauuaugaugguaguuuacacccuauuugguucaaguguuuaaaaaugcuccuggaagauauaggauucucuucacaauugauugaccaaauuugcaacucaaaacauauauauaaaucuaaauauuaugaaguugaagguggcaugccaucuggaugugcagguacaaguauuuuuaauacuaugauuaauaacaucauaauuagaguuuuaguguuagaugcauauaagaacauagauuuagauaaauuaaaaauccuggcauacggagaugauguuauuuuuucuuacaauuuuaaauuagacauggaaauacuugccagagaaggggacaaauauggucuaacuauuacaccugcagacaaauccaguacuuuucaggaauuaaccuacaaaaauguuacauuccuuaaacguggguucagagcugacgaucgucacucuuuucucauacacccuacuuuuccagcaacagagauuuaugauucuauuagauggacaaagaacccgucaugcaugcaggagcauguguuaucacugugucaucuaauguggcacaaugguagacaugaguaucagaauuuugucaaagguauacgcaguguguccgcuggucgcgcauuguauauaccagccuaugaaguucuugagcaugaaugguaugagaaauuuuagauauaaaacuguuaaauguaguuaguuuauuaguuuuau

SEQ ID NO: 4 - RNA, 7108 nt, Human rhinovirus
uuaaaacuggguucagguuguucccaucugaacuucccacguggaguaguacacuauuauuacgguaauuuuguacgccaguuuuaccucccuccccaaauguaacuuagaagauguacacaacgaccaacaggcggugguuauccaaaccaucaaaggucaagcacuucuguuuccccggucaauguugauaugcuccaacagggcaaaaacaacugcgaucguuauccgcaagaugccuacgcaaagcuuaguaacacuuuggaagauuuauggcuggucguuccacuauaccccauaguagaccuggcagaugaggcuagaaauaccccacuggugacaguguucuagccugcguggcugccugcgcacccuaugggugcgaagccauacauuggacaaggugugaagagccccgugugcucaucuugaguccuccggccccugaauguggcuaaccuuaaccccgcagccagugcacacaauccaguguguuuuuggucguaaugaguaauugugggaugggaccaacuacuuuggguguccguguuucacuuuuuccuuuauuaugcuuauggugacaauauauacauauauauugacaccaugggcgcucaaguuuccaggcagaauguuggaacgcacucuacgcaaaacgcaguuucuggaggaucuaguuuaaauuauuucaauauuaacuacuuuaaagaugcugcaucaucaggggcaucuagacuugauuuuucucaagacccuagcaaauuuacagacccagugaaagauguucuuaccaaggguauucccacacuacaaucacccacagucgaagcguguggauauucagauaggauaauacagauuacaaggggugacaccaccaucacaucacaagauauagcaaaugcaguuguugccuaugguguguggccuacauaccucaacucaaaagaugcaacagccauugauaaaccuacucaaccugauaccucaaccaauagauuuuacacauuagaaaguagagaguggagaagugauaguaaagguuggugguggaagcuaccagaugcgcucaaagacauggguguauuuggggagaauauguuuuaccauucacuagguagagcagguuauaugauucauguucaguguaaugcaaguaaauuucacucagggacucucuugguuguugcuaucccagaacaccaacuaucguaccuuggcacagguaauguaacgguuggauacaggcacacacacccaggagagaaugguagagaaauugcugaaguugcaaauaggaaugaaagacaaccaucauaugacagcugguugaacuguaauggcacauuauuggguaaugcccugauuuucccacaucaguuuauaaauuuaagaacaaacaaugcugcaacccuaauacuaccauaugugaaugcaacccccauggauuucaugcucagacacaacaacuggucauuguugauuguacccaucucucaacuuagaggugauacaaacuccauacccauuacaauuuccauuucucccauggcagcagaauucucuggugcgcgcaaucgcagugcgcgaauagaaggacuaccaguuaugcucacaccagguucagggcaauuucuaacaacugaugauaugcaauccccuucaguuuuaccauacuuccacccaacucaggaaaucuuuauaccaggggaaguuaaaaacuugguggagcuaugccaaguugauaccauggucccuuuaaauaacaucaaugcuaguagaaacagaauugauauguaugcacuaccacucacgagacaaccccaauccgcuguaaaauuauuuaccaucccaauugauauugcaucaccaccacuuaauacaacacuuuugggugagauagcuucuuauuauacgcacuggaccgguaguauuagauuaagcuucauguucugugguagugcaaauucaucauuaaaguuacucauugcuuauacccccccaggagcaccagaacccacuaagagaaaggaagcaauguuagguacacauauagugugggauguaggucugcaauccacuuguucauuaauuaucccuugggucucugccucucauuuccgcaacaccacaccagauacauacucuaaagcugguuuuguaacauguugguaccaaacuaauuuuguuacagcuccagaugcaccuaccacugcggauaucauuugcuuggugucugcaugcaaagacuuuuguuuaaggauggcaagagauacagaucaacauacucaggugggugcuauaacacaaaacccuauugaacaauucacagaggcaguauuaaacgagguucuuguaguuccaaacacacaagcuaguaauggaucuauagcaaauucagcaccagcauuagaugcagcagagacuggacacacaaguucagugcaaccugaagaucuuauagagacuagguauguaauuacagaucaaacuaggcaugagacaucacuggaaucuuucuuggguagagcaggaugcauuaaaaucauugcauuagaacuagaucaugacaacuaugaugaaaguuucaggaccuggggaauaaacauacaagagaugucacaaauuagaaggaaauuugagauguucacuuauguaagauuugauucagagauaacaauuguaccauguauugcagcuauaaaaggugaccuuggacacauaguccuucaauacauguauguucccccgggugcaccucuuccagauaaaaggaugcacgaugccuggcaaaccaguacaaaugccucagucuucuggcaaguuggacaaacuuaucccagauucaccauaccuuucuccagcauagcaucagcuuauuacauguucuaugaugguuaugauucagaugguuuagaugcuauuuaugguauuccuguuacaaaucacaugggcacaauaugugugagaauggugacagauaaacagaaaauuaaaacuaaaauugauucaagaauauaccugaaagcaaagcacauuaaagcuugguguccuagaccccccagagcaguuacguauaaccauauauacaaccccaauuauguuagagagggaguaacaccagaaacuaagguuaaauauagagcugaagucacaaccauuggaccuucugaaauguuuguacauacuaccaaccuuauguacaggaauuaccacuugaccccagagcaagaauuagauagugcaauucaaguaguuuacacugcagacuuagucauacaccgcacaaacgauaaaggugaugacuacaucccagauuguaauuguacagauugcuguuauuauugugcccacaaaaacagauacauaccaguuaaaguuagguauuacaauuauuacaccauacaggagucagaauacuacccaaaacacauacaauaugacauuuuacuaggugaaggaccaucagaaccaggagacuguggaggaaaauuguuaugcaaacaugguguuauuggaaugguaacagcagguggagauaaucauguugcuuucauagaucucagaaaauacaggaucacagaagcugaagagcaagguauaacugauuauguaaaaucucuuggugaugccuuugggguagguuuuguugaacaaauuaaagagcaagugagcaauauaaauccauuaaacaaaauuagugcuaagguuauaaaaugguugauuagaguaauaucagcauuaguuauugcaguucgaagucaaggggauuuagcaacauuaucagcuacauuaguucuucuuggaugcucagauucacccuggcguuuucuaaaacaaaaaguaugccaaugguuggaucuuagauaugugcacaaagaaucagaugguuggauuaagaaguuuacagagaugugcaaugcagcaaggggguuggaauggauuggaugcaaaauaucaaaauucauugacuggcuaaaaucuaugcuuccacaagcucaaaacaaaauuaaguucuuacaguucacaaaacaacuacaacucaaggagaaacagauugauggauugcccuaugcaaccauuaaacagcaggaagaauaucuacaggagauggaggaaauguuagauauuucaaacaaacuauuaccauuauaccccagagaaaauaaaaugauaaaagauuuguugaaacaggcaaaaaacaugacaguagcaucaaagagaauugaaccaguggcuguuauguuucauggagauccaggaucagggaaaucuaucugcacaaacauucuugcucgaaugaucacuaacccaucagacauauacucauuaccaccugauccaaaauacuucgauggauaccaccaacaaacaguugugaucauggaugaugugaugcagaacccaaacggagaagacaugaguacauucugucaaaugguaucaucaguuaacuauguaguuccuauggcugaccuaccagauaaaggcacucuguuuucaucagauuauguauucuguaguaccaaccagcauauucuaaccccuccaacuauaucaacacuaccugcccuaaaccgcagacuguucuuggaucugacaaucaaggugaacccaaaauacuuagaaucagguaagcuuaauuuggauugugcucuuaaggcuugugaucaagaacagaaaauuggaaaugcacgcugcuguccuuugauaugugguaaagcugucucauuugucaacaggaauaacaaugaggaacuaucacuaucacggguauacaaucagauuguacaugagcacaaccgccgccuaaauguaucaaaacauauggaggcgauuuuucaagguccaaucaacaugcaaucaccuccaccuccagcuauaguugauuuacuuagauccacuagaaaugaggaaguuauuaauuauuguaaaaaccagaacuggaucauucccgcugauguuaguguagagagagaguuaaacuugguaaacuuauccauaucaauauuggcaaacauaaucaguauaguuggaauuauauauauaauauacaaacuauuuauuucauugcaagguccauacagugguuugccaucaaagaaaaagacuauaccagaaaaaagaauuguuguacagggacccacaacagaauuuggucuuagccuaauuaaacacaauacauguguuguggaaacagauaaugguaaauuuacagguuugggcauauuugauaaugugcuuguaauaccuacccaugcugauccagguaaaaguguuaauauagaugggguugaaguaaaagugguagauucauaugauuuguuuaauaaagaaggaguaaaacuagaaauuacagugauccucuuauccagaaaugagaaauuuagagauauuaggaaauacauaccaaauucagaggaugacuauaccaauugcaacuuagcucucguugcaaaccaagaagugccccagaucuuggagguuggugaugugguaucauaugguaacauacuacugaguggaaauaacacugccaggaugcuuaaauaugauuaccccaccaaaucaggguucuguggaggaguguuauacaaagugggucaaguaauuggaauacauguaggugguaauggaagacaaggauuuucagccaugcuacucaaaagguacuuuaaccagcaacaaggucaaauuauuauaaagaaaccagugaaggaaguagauuaucccaguauucacacaccuacuaaaacuaaacugcaacccagcauuuuccacgauguauucccuggggucaaggaaccagcaguauuaucagagaaagauccacgucuacaaguggauuuaaacacaucucuuuucucaaaauaugcagguaacaagcaaauggaggugaaugaguauaugaaaguagcagcaucacacuaugccucucaacuagaaacuuuagauauaccuaaucaacaaaugucaauugaagacuguguuuauggaacagacaauuuggaggcauuggauuuaaacaccagugcaggguuuccauauguggcauuagguauuaagaagaaagacauaaucaacaagagcaccagagacacaucaaaaaucaaaaacuguuuagauacuuauggaguagauuugccaaugauaacauaucuaaaagaugaacuuagagcaccagaaaaaguuaaaaugggaaaaaccagagugauagaagcuagcagucuaaaugacacugugcacaugcgcauguuauuugguaacuuauuuaaagcuuuccaugccaauccagguaucauuacgggcugugccgugggcugugauccugagguguuuugguccaaaauuccaccaauguuaggugauggaaguguuauggcuuuugauuauacaaauuaugauggcaguuugcauccagucugguuuaagauguuagaaguaguauuagauagguugggauucccagguugugcuauuagaaaauuaucacacucugcucauaucuauaagggcacuuauuaugagguggaugggggaaugccaucaggaugugccgggacaucaaucuuuaacucaaugauuaacaauauuauaauuagaacaauaauauuacauggauacaagaacauugaucuggaccaguugagaauacuaacauauggugaugacauaauauucacauacccagacaagcuugacaugaguuaucuagcccaaauuggugagcaauauggcuugaagaugaccccagcugacaaaucagacacauuuaaagauuuagauuugagcacugcuaccuuuuuaaaaagagguuucaaaccagacacacaccaucccuuccugauucaucccacguacccaauucaggacauuuaugaguccauaagauggacaaagaauccaagaugcuugcaagagcauguucuuagccuggcucauuugugcuggcacaauggaccagaacaauaugcugauuuuaucgggaaaaucagaucuaucccgauaggaagaagccuguaccuaccauccuacgacguuuuguuguacgaaugguacgaaaaauuuuaaaauauauacauuaguuaucuggguagcuuagguauau

SEQ ID NO: 5 - RNA, 7134 nt, Human rhinovirus
uuaaaacuggaucuggguuguucccacucaggucucccacguggaguaguacacuguuauuacgguaacuuuguacgccaguuuuacauccccuccccccaaguaacuuagaagauaagcacacaggccaauaggagaugaucagccagaucauuaugggccaagcacuucuguuuccccggucgaaguugauaugcuccaacagggcaaaaacaacugagaucguuauccgcaaagcgccuacgcaaagccuaguaacuaucuggaaauuacuugguuggucgcuccgccauaccccaugguagaccuggcagaugaggcuagaaauuccccacuggcgacaguguucuagccugcguggcugccugcacacccuuuuugggugugaagccaaguaauggacagggugugaagagccccgugugcucgcuuugaguccuccggccccugaauguggcuaaccuuaaccccgcagcuagagcacacaacccaguguguaucuagucguaaugagcaauugcgggaugggaccaacuacuuuggguguccguguuucuuguuuuucuuuuauauuugcuuauggugacaauauauagugauauauauuggcaucaugggcgcucagguaucuagacaaaauguuggaacucacucuacacaaaacucaguuucaaauggaucuagccugaauuauuucaacauaaauuacuuuaaggaugcugcuucaaguggcgcaucaaaauuggaauuuucacaagacccuaguaaauuuacugauccagucaaagauguucuugaaaaagggauaccuacuuugcagucacccacuguugaggcauguggauacucagauagaauaauccaaauuacaagaggggauucaacaauuacuucacaagauguugcuaacgcaguuguuggcuauggagucuggccccauuaccuuacuccacaggaugcaacugccauagauaaacccucucacccugacacuucaucaaauagguuuuacacucuggagaguaaaacauggaguaaugaauccaagggcuggugguggaaauuaccugaugcuuuaaaggacaugggaauauuuggacaaaacauguauuaccacuuucuuggucgaaguggguacacaguucaugugcaguguaauucaagcaaauuucaucaagggaccuugauuguugcuaugauaccagaacaccaauuagcugcagcagaaaggggcaaugucacugcuggauacaauuucacacauccuggugagccugguagagagguuggaaaaccuaaucgucaguauacaaguaaacaaccuagugaugacaauuggcucaauuuugauggcacacuuuuggguaauauaacuauuuauccacaccaguuuauaaaucuaagaagcaacaauucagccacaauaauagugccauaugugaaugcaguacccauggauuccaugcucagacauaacaauuggaguuuaguaaucauaccuauuugcccacuacaaucuaguggaacugagucaaguacaaucccuauuacuauuucuauuagccccauguuugcugaauuuucaggugcacgugcaaaaagucaaggauuaccuguguuaacaacaccagggucuggucaguucaugaccacagaugauuuucaaucuccuagugcauuaccaugguuccacccaacuaaagagauaucuauaccuggacagguaagaaauuuaauagaaaugugucaaguagauaccaucauaccuauaaacaacacuggaaccaacacuacaagcaucaacauguacacagugcaguuggaaagaacagcugauuugaugagugaaguuuuugcuauaaauguagauauagcaucccaccccuuagcaaccaccaugcuaggagaaauugcaaguuauuacacacacuggacagguagcuugcguuucaguuuuauguucuguggaucagccagcaccacuuugaagcuucuauuggcauacacuccaccagggauugcaaaacccauaaguagaagagaugcaauguuagguacccauguagugugggauguuggcuugcagucaacuauauccaugguagugcccuggguuagugcuagucauuucagaaacacaaccccggauaaauacucacuggcaggguucauaacuuguugguaccagacuaaccuugugguuccagccgauaccccaacuacagcaaaucuacucuguuucguauccgcuugcaaggauuucugcuugcgaauggcucgggacacuaaucuacacaaacagagugggccaauaacccagaauccaguggaaaauuacauagaucaggugcuuaaugaaguucugguagucccaaacaucaaagaaaguaauccuacaaccucuaauucagccccugcucuagaugcugcugaaacaggucacaccaguaauguucaaccugaagacaugauugagacacguuauguacaaacaucacaaaccagagaugaaaugagccuugagagcuucuuaggaaggucaggcuguauacacauaucuaaauuaaauguugauuaugauaauuaugauaagagugucaaaaauuucacaauuuggaagauaaacauaaaagaaauggcccaaaucagaagaaaguuugaauuguuuacauaugccagauuugacucugaaauaacacugguuccauguauagcagcagaaagugaaaguguuggccaugugguuaugcaguacauguaugugccaccaggagcaccccuaccaaggaccagagaugacuaugcauggcaaucaggcacaaaugcuuccauuuucuggcaacauggacaaucauaucccagauuuucacuuccauuuuugagcauugcuucugcauauuacauguuuuaugauggcuaugaugguggaccagauucucaauaugguacaauugugacaaaugauaugggaucauuguguucccguauagucacugaagagcauggaucucguguaaaaauuucaacuagaauauaccacaaagcuaagcaugucaaagcuugguguccaaggccucccagggcaguugaauauauacacacacaugucacaaauuacaagccaagugaaggugaauauucuacaguuauaccaguuagagacaacguuagggcaguaaggaauguaggacccagugauauguauguccauguaggaaaccuaauauauagaaaucuccacuuguucaauucagaagcaaaugauucaguuuuaauaucauacucaucagauuuagucauauaccgcacaaacacuacaggugaugacuacauaccaacuugugauuguacugaugcuaccuacuacuguaaacauaaaaauagauauuacccuauaaaaguuacuagccaugauugguaugagauacaggagagugaguauuauccaaaacauauacaauacaauuuacuaauaggugaaggaccuugcgaaccuggugacugugguggaaaacuauugugcaaacauggugugauagguaugauuacagcugguggugagggucauguugcauuuauagauuuaagacacuuucacugugcugaagagcaaggcauuacugacuauauacacaugcugggugaagcuuuugggaauggcuucguagauagugucagagagcaagucaaugcaauaaaccccauaaauaacauaaguaagaaaauaaucaaauggaugcuuaggauaauaucagccauggucauuaucauuagaaauaguucugauccacaaacaauaauagccacacuaacuuugauuggguguucugguucaccauggcgguucuuaaaagagaaauuuuguaaauggacacaacuaaauuauguacauaaagaaucagacucuuggcuuaagaaauuuacagagauguguaaugcugccagagggcuugaguggauaggaaacaaaauauccaaauucauugauuggaugaagucaauguugccacaagcacagcuuaaggucaaauaccuaagugaauuaaagaaguuaaauuugcuagaaaaacaaauugacaaccuacguugugcugacacaaaagugcaggaaaagauaaaauuugaaauagagacacuucaugauuuaucauguaaauuucuuccauuauaugcaagugaggcaaaaagaauaaaaauuuuacacaauaaauguuguaacauaauuaaacaaaggaaaaggagugaaccuguugccaucaugauacauggaccgccugguacugguaaguccauuaccacuaguuuucuugccagaaugauaacaaaugagagugacauuuauucauuaccuccagacccuaaauacuuugauggcuaugaccaacaaaguguagucauaauggaugauaucaugcaaaauccugguggugaagacaugucucuauucugucagaugguguccagugugacuuucauaccuccaauggcugacuuaccugauaaaggaaaaccuuuugacuccagauuuguuuuuuguaguaccaaucacucacuucuagcuccacccacuauuaccucacucucugcaaugaauagaagauucuuccuagauuuggauauuauagugaacgaaaauuucagagacucucaagggaaauuagaugugccaaaaucuuucaaacccugugauauagauaacaaaauuggaaaugcaaaaugcugucccuuuauauguggaaaagcagucguguuuaaagauagaaacacaugucaaacauauacacugugccaaauuuacaacaugaucauugaggaagacaagcggcgcagaaauguuauugacgucaugacugcaauuuuccaggguccuauaaccaugaacucaccaccucccccugcaauagcugauuuacuacaaucggugaggacuccagaaguuguuaaauauugugaggauaacaaauggauaauuccagcugaauguaagauagaaagggaucucaaucuugcaaauaauauaauaacaaucauugcaaauaucauuaguauagcagguauuauauuuguuauuuauaaauuguuuugcucauugcaagggccauauucuggugaacccaaaccaaaaacaagaguuccugaaagaagagugguagcacagggaccugaagaagaauuuggccguucauugaucaaacauaauacaugugugguuacaacugauaauggaaaauucacugguuuagguaucuaugauagauauaugauuaucccaacacaugcugauccaggaaaaacugugcaaauuaaugguauugucacaaauguuguugacucauaugacuuacauaacaaagaugggauuaaacuugaaaucacaguuaucaaacuagacaggaaugaaaaauuuagagacauacgcaaguacauaccagaaagagaagaugacuauccugaguguaaucuagcacuuguagcaaaucaggaugaaccaacaaucauuagugugggugauguuauaucauaugguaacauacuacuuaguggcaaucaaacugcuagaaugcuuaaauaucauuacccaaccaaaucuggauacugcgggggugucuuauacaaaauagguaguauaauaggaauucauguggguggcaaugguagagauggguucucagcaauguuauuaagaucauacuuuaaugaaacacaaggacaaauaguuaguucaagaaauguuaaagacauuggguauccaacaauccauaccccuaguaaaaccaaauuacauccaaguguuuuucaugauguauucaaagguacaaaggaaccugcuguuuuaucagagagagauccgcguuuagaaguggauuucaagacuucuuuauucuccaaauacaaagguaauguagauuguacauuaaaugaacacaugagaguagccauagcacauuacucagcucaauuaaugacucuugacauaaacccaaacaacauaacuauggaagagaguguauuuggaacagaugguuuagaggcuuuagauuuaaacacaagugcaggauuuccauaugugaguaugggaauuaagaagagggaucuuaucaacaauagcacuaaagacauaucuaaauuaagagcugcacuugauaaguaugggguggacuuaccaauggucacuuuccuuaaagaugaacuuagaaagaaagagaaaaucucaucugggaaaaccagagucauagaagccaguaguguuaaugacacuguagcauuuagaaugacuuauggcaacuuauuugcaugcuuucacaagaacccuggaauugucacugguucagcaguaggaugugauccugagacuuuuuggucaaagauaccugugauguuagauggcgaaugcauaauggcauuugacuauacaaauuaugaugguaguauccacccuguuugguuugaagcauugaaggaaauucuaaaagaauuaaaauuugagcauagguuaauagauagguuguguaauucuagacauauauuuagagacacuuauuaugaaguugaaggggggguacccucaggauguucuggaacuagcauauuuaauacuaugauuaauaaugugaucauuagaaccuugguuuuagaugccuauaaaaauauagauuuagauaagcuuaagauaauagcuuauggggaugaugucauuuucuccuacaaauacccauuagacauggaggcuauugcaauggaaggaaagaaauauggguugaccaucacuccugcagacaagucugacaccuucaagaaauuggauuaugacagugucacauuucugaaaagaggauucaaacaagacucuaaauauccuuuccuuauacaucccacuuuuccgauuaaugaaauucaugaaucaaucagauggacaaagaaaccaucucaaaugcaagagcacgugcuuucauugugucauuuaauguggcauaauggacgcgacguguauaaggaguucgagaaugggauacgcagcgucagcgcuggacgugcguuguauaucccaccuuaugagcuccuguugcaugagugguaugaaaaauuuuaaauucuauauauagaaauaacaaauacuuaguuuguuaguuuuau

SEQ ID NO: 6 - RNA, 7133 nt, Human rhinovirus
uuaaaacuggaucuggguuguucccacucaggucucccacguggaguaguacacuguuauuacgguaacuuuguacgccaguuuuauauccccuccccucaaguaauuuagaagauaaacacacagaccaauaggagaugaucagccagaucauuaugggucaagcacuucuguuuccccggucgaaguugauaugcuccaacagggcaaaaacaacugagaucguuauccgcaaagcgccuacgcaaagccuaguaacuaucuggaaauuacuugguuggucgcuccgccauaccccaugguagaccuggcagaugaggcuagaaauuccccacuggcgacaguguucuagccugcguggcugccugcacacccuuuugggugugaagccaaguaacggacagggugugaagagccccgugugcucgcuuugaguccuccggccccugaauguggcuaaccuuaacccugcagcuagagcacacaacccaguguguaucuagucguaaugagcaauugcgggaugggaccaacuacuuuggguguccguguuucuuguuuuucuuuuauauuugcuuauggugacaauauauagugauauauauuggcaucaugggcgcucagguaucuagacaaaauguugggacucacucuacacaaaacucaguuucaaauggaucuagucugaauuauuucaacauaaauuacuuuaaggaugcugcuucaaguggcgcaucaaaauuggaauuuucacaagacccuaguaaauuuacugauccagucaaagauguucuugaaaaaggaauaccuacuuugcagucacccacuguugaggcauguggauacucagauagaauaauccaaauuacaagaggggauucaacaauuacuucacaagauguugcuaacgcaguuguugguuauggagucuggccccauuaccuuacuccacaggaugcaacugccauagauaaacccucucacccugacacuucaucaaauagguuuuacacucuggagaguaaaacauggaguaaugaauccaagggcuggugguggaaauuaccugaugcuuuaaaggacaugggaauauuuggacaaaauauguauuaccacuuucuuggucgaaguggguauacaguucaugugcaguguaauucaagcaaauuccaucaagggaccuugauuguugcuaugauaccagaacaucaauuggcugcagcagaaaggggcaauguuacugcuggauacaauuucacacauccuggugagccugguagagagguuggaaaacccaaucgucaguauacaagcaaacaaccuagugaugauaacuggcucaauuuugauggcacacuuuuggguaauauaacuauuuauccacaccaauuuauaaauuuaagaagcaacaauucagcuacaauaauagugccauaugugaaugcaguacccauggauuccaugcucagacauaacaauuggaguuuagugaucauaccuauuugcccacuacaaucuaguggaacugagucaagcacaaucccuauuacuauuucuauuagccccauguuugcugaauucucaggugcacgugcaaaaagucaaggauugccuguguuaacaacaccagggucuggucaguucaugaccacagaugauuuucaaucuccuagugcauugccaugguuccacccaacuaaagagauaucuauaccuggacagguaagaaacuuaauagaaaugugucaaguagauaccaucauaccuauaaacaacacuggaaccaacacuacgagcauuaauauguacacagugcaguuggaaagaacagcugauuugaugagugaaguuuuugcuauaaauguagauauagccucccaccccuuagcaaccacuaugcuaggagaaauugcaaguuauuacacacauuggacagguagcuugcguuucaguuuuauguucuguggaucagccagcaccacuuugaagcuccuauuggcauacacuccaccagggauugcaaaaccuacaaguagaagagaugcaauguuagguacccauguagugugggaugucgguuugcagucaacuauauccaugguggugcccuggguuagugcuagucauuuuagaaacacaaccccggauaaauacucacuagcaggauucauaaccuguugguaccagacuaaccuugugguuccagcugacaccccaacuacagcaaauuuacucuguuucguguccgcuugcaaggauuucugcuugcgaauggcucgggacacuaaucuacacaaacagaguggaccaauaacccagaauccaguggaaaauuauauagaucaggugcuuaaugaaguucugguagucccaaacaucaaagaaagcaacccuacaaccucuaauucagccccugcucuagaugcugccgaaacaggucacaccaguaauguucaaccugaagacaugauugagacacguuauguacaaacaucacaaaccagagaugaaaugagccuugagaguuucuuaggaaggucaggcuguauacacauaucuaaauuaaauguugauuaugauaauuaugauaagaguguuaaaaauuucacaauuuggaagauaaacauaaaagaaauggcccaaaucagaaggaaguuugaauuguuuacauaugcuagauuugacucugaaauaacacugguuccaugcauagcagcagaaagugaaaguguuggccaugugguuaugcaguacauguaugugccaccaggagcaccccuaccaaggaccagagaugacuaugcauggcaaucaggcacaaaugccuccauuuuuuggcaacauggacaaucauaucccagauuuucacuuccauuuuugagcauugcuucugcauauuacauguuuuaugaugguuaugaugguggaccagauucucaauauggcacaauugugacaaaugauaugggaucauuguguucccguauagucacugaagagcauggaucccguguaaaaauuucaacuagaauauaccacaaagcuaagcaugucaaagcuugguguccaaggccucccagggcaguugaauauauacacacacaugucacaaauuacaagccaagugaaggugaauauucuacaguuauaccaguuagagauaauguuagggcaguaaggaauguaggacccagugauauguauguccauguaggaaaccuaauauauagaaaucuccacuuguucaauucagaagcaaaugauucaguuuuaauaucauacucaucagauuuagucauauaccgcacaaacacuacaggugaugacuacauaccaacuugugauuguacugaugcuaccuacuacuguaaacauaaaaauagauauuacccuauaaaaguuacuagccaugauugguaugagauacaggagagugaguauuauccaaaacauauacaauauaauuuacuaauaggugaaggaccuugugaaccuggugacugugguggaaaacuauugugcaagcauggugugauagguauaauuacagcugguggugagggucauguugcauuuauagauuuaagacacuuucacugugcugaagaacaaggcauuacugacuauauacacaugcuaggugaagcuuuugggaauggcuucguggauagugucagagagcaagucaaugcaauaaaccccauaaauaauauaaguaagaaaauaaucaaauggaugcuuaggauaauaucagcuauggucauuaucauuagaaauaguucugauccacaaacaauaauagccacauuaacuuugauuggguguucugguucaccauggcgguuuuuaaaagagaaauuuuguaaauggacacaacuaaauuauguacauaaagaaucagacucuuggcuuaagaaauuuacagaaauguguaaugcugccagagggcuugaguggauaggaaacaaaauauccaaauucauugauuggaugaagucaauguugccacaagcacagcuuaaggucaaauaccuaagugaauuaaagaaguuaaauuugcuagaaaaacaaauugacaaccuacguugugcugacacaaaagugcaggaaaagauaaaauuugaaauagagacacuucaugauuuaucauguaaauuucuuccauuauaugcaagugaggcaaaaagaauaaaaauuuuacauaauaaauguuguaacauaaucaaacaaaggaaaaggagugaaccuguugccaucaugauacauggaccgccugguacugguaaguccauuaccacuaguuuucuugccagaaugauaacaaaugagagugacauuuauucauuaccuccagacccuaaauacuuugauggcuaugaccaacaaaguguagucauaauggaugauaucaugcaaaaccccgguggugaagacaugucucuauucugucagaugguguccagugugacuuucauaccuccaauggcugacuuacccgauaagggaaaaccuuuugacuccagauuuguuuuuuguaguaccaaccacucacuucuagcuccacccacuauuaccucgcucucugcaaugaauagaagauucuucuuagauuuggauauuauagugaaugagaauuucagagacucucaagggaaauuagaugugccaaaaucuuucaaacccugugauauagauaacaaaauuggaaacgcaaaaugcugucccuuuauauguggaaaagcagucguguucaaagauagaaacacaugucaaacauauacacugugccaaauuuacaacaugauuauugaggaagacaagcggcgcagaaauguuauugacgucaugacugcaauuuuccaggguccuauaaccaugaacucaccaccucccccugcaauagcugauuuacugcaaucagugaggacuccagaaguuguuaaauauugugaagauaacaaguggauaauuccagcugaauguaagauagaaagggaucucaaucuugcaaacaauauaauaacaaucauugcaaauaucauuaguauagcagguauaauauuugucauuuauaaauuauuuugcucauugcaagggccauauucuggugaacccaaaccaaaaacaagaguuccugaaagaagagugguagcacagggaccugaagaagaauuuggccguucauugaucaaacacaauacauguguaguuacaacugacaauggaaaauucacugguuuagguaucuaugauagauauaugauuaucccaacacaugcugauccaggaaaaacugugcaaauuaaugguauuguuacaaauguuguugacucauaugacuuacauaacaaagaugggauuaagcuugaaaucacaguuaucaaacuagacagaaaugaaaaguuuagagacauacgcaaauacauaccagaaagagaagaugauuauccugaguguaaucuagcacuuguagcaaaucaggaugaaccaacaaucauuagugugggugauguuauaucauaugguaacauacuacuuaguggcaaccaaacugcuagaaugcuuaaauaucauuacccaaccaaaucuggauacugcgggggugucuuauacaaaauagguaguauaauaggaauucauguggguggcaaugguagagauggguucucagcaauguuauuaagaucauacuuuaaugaaacacaaggacaaauaguuaguucaagaaauguuaaagacauuggguauccaacaauccauaccccuaguaaaaccaaauuacauccaagugucuuucaugauguguucaaagguacaaaagaaccugcuguuuuaucagagagagauccacguuuagaaguggauuucaagacuucuuuauucuccaaauacaaaggcaauguagauuguacauuaaaugaacacaugagaguagccauagcacauuacucagcucaauuaaugacucuugacauaaacccaaacaacauaacuauggaagagaguguauuuggaacagaugguuuagaggcuuuagauuuaaauacaagugcaggauuuccauaugugaguaugggaauuaagaagagggaucuuaucaauaauaguacuaaagacauaucuaaacuaagagcugcacuugauaaguaugggguggacuuaccaauggucacuuuccuuaaagaugaacuuagaaagaaagagaaaaucucaucugggaaaaccagagucauagaagccaguaguguuaaugacacuguagcauuuagaaugacuuauggcaacuuauuugcaugcuuucacaagaacccuggaauugucacugguucagcaguaggaugugauccugaaacuuuuuggucaaagauaccugugauguuagauggugaaugcauaauggcauuugacuauacaaauuaugaugguaguauccacccuguuugguuugaagcauugaaggaaauucuaaaagaauuaaaauuugagcauagguuaauagauagguugugcaauucuagacauauauuuagagacacuuauuaugaaguugaaggggggguacccucaggauguucuggaacuagcauauuuaauaccaugauuaauaaugugaucauuagaaccuugguuuuagaugccuauaaaaauauagaucuagauaagcuuaagauaauagcuuauggagaugaugucauuuucuccuacaaauacccauuagacauggaggcuauugcaauggaagggaagaaauauggauugaccaucacuccugcagacaagucugacaccuucaagaaauuggauuaugacagugucacauuucugaaaagaggauucaaacaagacucuaaauauccuuuccuuauacaucccacuuuuccgauuaaugaaauucaugaaucaaucagauggacaaagaaaccaucucaaaugcaagagcacgugcuuucauugugucauuuaauguggcauaauggacgcgacguguauaaggaguucgagaaugggauacgcagcgucagcgcuggacgugcguuguauaucccaccuuaugagcuccuguugcaugaaugguaugaaaaauuuuaaauucuguauauagaaauaacaaauacuuaguuuguuaguuuuau

SEQ ID NO: 7 - RNA, 7132 nt, Human rhinovirus
uuaaaacuggaucuggguuguucccacucagaucucccacguggaguaguacacuauuauuacgguaaucuuguacgccaguuuuauaauccccuuacccaaguaacuuagaagauaaacacaaagaccaauaggagaugaucauccagaucaucauaggucaagcacuucuguuuccccggucaagguugauaugcucuaacagggcaaaaacagcugagaucguuauccgcaaagcgccuacgcaaagccuaguaacuaucuggaaguugcuugguuggucgcuccgccauaucccaugguagaccuggcagaugaggcuagaaauuccccacuggugacaguguucuagccugcguggcugccugcacacccucugggugugaaaccaaguaauggacagggugugaagagccccgugugcucgcuuugaguccuccggccccugaauguggcuaaccuuaacccugcagcuagggcacacaauccaguguguaucuagucguaaugagcaauugcgggaugggaccaacuacuuuggguguccguguuucuuguuuuucuuuuauguuugcuuauggugacaauauauaguaauauauruuggcaucaugggcgcucagguaucuagacaaaauguugggacucacuccacacaaaacucaguuucaaauggaucuagccuaaauuauuucaauauaaauuacuuuaaggaugcugcaucaagcggugcaucaaagcuugaauuuucacaagacccuaguaaguuuacugauccagucaaagauguucuugaaaaagggauacccacuuugcaaucacccacuguugaggcguguggauacucagacagaauaauccaaaucacaagaggagauucaacaauuacuucacaagauguugccaaugcaaucguugguuauggaguuuggccucauuaccuuacuccacaagaugcaacugcuauagrcaagccuucucacccugauacuucgucaaauagguuuuacaccuuggagagcaaaacguggagcagugauuccaaaggcuggugguggaaguuaccugaugcauugaaggacaugggaauuuuugggcaaaauauguacuaccacuuccucgguagaaguggauauacaguccaugugcaaugcaacucaaguaaguuccaccaagggaccuugauuguugccaugauaccagaacaucaauuggcugcagcagagagaggcaaugucaccgccggguauaacuucacacacccuggugaaccugguagagagguuggaaagccuaaccgucaguauacuaguaaacaacccagugaugauaauuggcucaauuuugauggcacacuuuugggcaacauaacuauuuauccacaccaguuuauaaacuuaagaagcaacaauucagccacaauaauaguaccauaugugaaugcagugccuauggacucuaugcucagacacaauaacuggagucuaguaauuauaccuaucugcccacugcaauccaguggaacugagucaaguacamucccuauuacuauuuccauuagccccauguuugcugaauuuucuggugcacgugcgaagagucagggauuacccgugcuaacaacaccaggaucuggccaauuuaugacuacagaugacuuucaaucuccuagugcauuaccaugguuucauccaacuaaagaaauaucuauaccugggcaaguuagaaacuuaauagaaaugugucaaguagauacuaucauaccuauaaacaauacuggaacuaacacuacaagcauuaacauguauacaguacaaguagagagacaagcugauuugaugagugaaguuuuugcuauaaauguagauauagcuucccaccccuuagcaaccacuauguuaggagagauugcaaguuauuacacacacuggacagguaguuugcguuuuagcuuuauguucugugggucagcuaguuccacuuugaaacuuuuauuagcauacaccccaccaggaauugcaaaaccuacaaguagaagagaugcaauguuagguacucauguaguaugggauguugguuuacaaucaacuauaucuauggugguaccuuggguuagugcuagucacuuuagaaacacaacuccagauaaguacucauuagcaggauuuauaacuugcugguaccaaaccaaccuuguaguuccagcugacacaccaacuacagcaaacuuacuuugcuuuguaucugcuugcaaggacuucugcuugcgaauggcucgggauaccaaucuacacaagcaaaguggcccaauaacccaaaauccaguggagaauuacauagaucaggugcuuaaugagguuuugguagucccaaacauuaaagagagcaacccuacaaccucuaacucagcuccagcucuagaugcugcugagacaggccauacuagcaauguucaaccugaagacaugauugaaacacguuaugugcagacaucacaaaccagagaugaaaugagucuugaaagcuucuuagggagaucagguuguauacacauaucuaaauugaauauugauuacagugacuaugauaagaguguugaaaauuucacaaucuggaaaauaaauauaaaggaaauggcccagaucaggaggaaauuugaauuguuuacauaugcaagauuugacucugaaauaacauuggucccguguauagcagcagaaagugauagcguuggccauguuguuaugcaguacauguauguaccaccaggggcaccuuuaccaaggacuagagaugauuaugcauggcaaucaggcacaaaugcuuccaucuuuuggcaacauggacaaucauaucccagauuuucacuuccguuyuugagcauugccucugcauauuacauguucuaugaugguuaugaugguggaccagauucucuguauggaacaauuguaacaaaugauaugggaucuuuauguucccguguaguuacugaagagcauggaccccgugucaaaauuucaaccagaauauaucacaaagccaaacauguuaaagccuggugcccaagaccuccuagggcaguugaguauauacauacacaugucacaaauuacaagccaagcacaggcgauuaugccacaguuauaccaguuagagacaauguuagggcaguaaagaauguaggacccagugauauguauguucauguaggaaauuugauauacagaaaucuccacuuauucaacucagaagcaaaugacucuguuuuaauaucauacucaucagauuuagucauauaccgcacaaacacuauaggugaugacuauauaccaacuugugauuguacugaugccacuuacuacuguaaacauaaaaauagauauuaccccauuaaggucaccagucaugauugguaugaaauacaagagagugaauacuacccaaaacacauacaauacaauuuguuaauaggugaaggaccuugugaaccuggugauugugguggaaaauuauuaugcaaacauggugugauaggaauaauuacagcugguggugagggucauguugcauuuauagauuuaagacacuuccauugugcugaagaacagggcauuacugauuacauacacaugcugggagaggcuuuuggaaauggcuuuguagauaguguuagggaucaagucaaugcaauaaacccuauaaauaauauaaguaagaaaauagucaaauggaugcuuagaauaauaucagccauggucaucauuauuagaaauaguucugauccacaaacaauaauagccacauugacuuugauuggguguucugggucgccauggcgauucuuaaaagaaaaguuuuguaaauggacacaacugaauuauguacacaaggagucagauucuuggcuuaagaaauucacagagauguguaaugcagcuagaggacuugaauggauaggaaauaaaauaucuaaguucauugauuggaugaaaucaaugcuaccacaggcacagcuuaaggucaaauacuugagugaauuaaagaaguuaaauuuacuagagaaacaaauugauaaccuacguugugcugacacaaaaguacaggaaaagauaaaauuugaaauagacacacuccaugacuuauccuguaaauuucuuccauuauaugcaagugaggcaaagagaauaaagauuuugcauaacaaauguuguaauauaauuaaacaaaggaaaagaagugagccugucgcyaucaugauacauggaccaccugguacuggcaagucuauaacaacuagcuuucucgccagaaugauaacaaaugagagugacauuuauucacuaccuccagacccuaaguacuuugauggcuacgaccaacaaaguguagucauuauggaugauaucaugcagaauccugguggugaagauaugucuuuauuuugucagaugguuuccagugugaccuuuauacccccaauggcugauuuaccugauaaaggaaaaccuuuugacuccagauuuguuuuuuguaguaccaaucauucacuucuagccccacccaccaucacuucacuuucugcaaugaauagaagauuuuaccuagauuuggauauuguagugaaugagaauuuuagagacucucaagggaaauuggaugugucaaaaucauucagaccaugugauauagauaauaagauuggaaaugcaaagugcugcccuuucauauguggaaaagcaguuguguucaaggacagaaacacaugccaaacauauacacugugccagauuuauaacaugauuauugaggaggauaagcggcguagaaaugucauugaugucaugacugcaauuuuccaggguccuauaacuaugaacucaccaccccccccugccauagccgacuuguuacaaucagugagaacuccagaaguuguuaaauacugugaauauaauaaauggauaaucccagcugaaugcaagauagaaagagaucugaaccuugcaaacaauauaauaacaauuauugcaaauauuauuaguauagcagguaucauauuuguuauuuauaaauuauucuguucauuacagggaccauauucgggcgaacccaagccaaaaacaagaauuccugagaggagagugguggcacagggucccgaagaagaauuuggccgcucacuaauaaaacacaacacauguguagucacaacugauaaugggaaauucacugguuuaggcauuuaugauagauacaugauuguuccaacacaugcugauccaggaaaaacugugcaaauuaauggcauugucacaaauguuguugauucauaugauuugcauaacaaagaugggauuaagcuugagaucacagucaucaaacuagacagaaaugaaaaguuuagagauauacguaaguauauacccgaaagggaggaugacuacccugaauguaauuuggcacuuguagcaaaccagguugaaccaacaaucauuaguguaggugauguuauaucauaugguaauauauuacuuagugguaaccagacugcuagaaugcuuaaauaucauuacccaacuaaaucuggguauuguggggguguccuguauaaaauagguaguauaauaggaauucaugugggugguaaugguagagauggauuuucagcaaugcuacuaagaucauacuuuaaugaaacacaaggacaaauaaucagcucaagaaauguuaaagaucuuggauacccaacaauucacacuccuaguaaaaccaaacuacauccaaguguuuuucaugauguauucaaaggcacaaaagaaccugcuguuuuaacagaaaaagauccacguuuggagguggauuuuaaaacuuccuuauucuccaaauacaaggguaauguagacugcacauugaaugaacacaugaggguggcuauagcgcauuauucagcccaauuaaugacucuugacauaaauccagauaacauaacuauggaagagaguguuuuuggaacagauggucuggaggccuuggauuuaaacacaagugcaggauuuccauaugugaguaugggaauuagaaagagggaucuyaucaauaacagcacuaaagauauaucuaaacuaagagcagcacuugauaaauaugggguggauuugccuauggucacuuuccucaaagaugaacuuagaaagaaagagaagaucucaucugggaaaaccagaguuauagaagcuaguaguauuaaugauacuguagcauuuagaaugacuuauggcaauuuguuugcauguuuucacaagaacccuggaauuaucacugguucagcagugggaugugauccugaaacuuuuuggucaaaaauaccugugauguuggauggugaguguauaauggcauuugauuacacaaauuaugauggcaguauccacccuguaugguuugaagcauugaaggaaauuuugaaagaauugaaauuugaacauagauugauagacagguuauguaacucuagacauauauuuagggauuccuauuaugagguugaaggggggguacccucaggauguucuggaacuaguauauuuaacacaaugauuaauaaugugauuauaaggacuuuagugcuagaugcuuauaaacauauagauuuagauaaacuuaaaauaauagcuuauggggaugauguuauuuuuuccuauaaauauccucuagacauggaagcuauugcaauggaaggaaagaaauauggauuaaccaucacuccugcagacaagucugacaccuuuaagaaguuagauuaugacagugucacauuucuaaaaagaggauuuaaacaagacuccaaauaucccuuccuuauacauccuacuuucccagugagugaaauucaugaaucaaucagauggacaaagaaaccaucucaaaugcaggaacacgugcucucguugugccauuugauguggcauaaugggcgugacguguauaaggaguucgagaacgggauacgcagcgucagcgcuggacgugcguuguauauuccgccuuaugagcuccuguugcaugagugguaugaaaaauuuuaaacuuuauauauagaaauaauaaacacuuaguuuauuaguuuuau

SEQ ID NO: 8 - RNA, 7137 nt, Human rhinovirus
uuaaaacuggauccagauuguucccaucuggauuucccacguggaguuguacacuauuauuccgguaauuuuguacgccaguuuuauguaccccccccuguaacuuagaaguuuugaacaaggaccaauaggcaguaaccacccagguugcuaaaggucaagcacuucuguuuccccggucaaaguugauaugcuccaacagggcaaaaacaacugagaucguuacccgcaaggugccuacgcaaagccuaguaaccccuugaacgaugugugguuggucguucggcuguaccccacaguagaccuggcagaugaggcuagauguuccccacuggcgacaguguucuagccugcguggcugccugcgcacucucugagugcgaagccauacauuugacaaggugugaagagccccgugugcucaccuugaguccuccggccccugaauguggcuaaccuuaacccugcagcuaguacaugcaauccagcaugcagcuagucguaacgagcaauugcgggacgggaccaacuacuuuggguguccguguuucacuuuuuccuuuuauauuugcuuauggugacaauauauagauuuauauauugucaccaugggcgcucaaguauccagacagaauguugguacucacucaacacaaaaugcaguuucaaauggaucuaguuuaaauuauuuuaacaucaacuauuucaaagaugcagcaucuagcggugcuuccaaauuggaauuuucacaagacccuaguaaauuuacagacccuguuaaagauguccuugagaaaggaauuccaacauuacaaucuccaacuguagaagcaugugguuacucagacagaaucauucagaucaccagaggugauucaacaauaacuucacaagauguugccaaugcagugguggguuauggcguguggccucacuauuuaagugcaacggaugccacugcuauugacaaaccuacucagccugacacuucuucaaauagauuuuacacucuugaaagcaaaguuuggacgagcacaucucaggguuggugguggaaguuaccagaugcacuuaaggacauggguauuuuuggagaaaauauguuuuaucacuaucuuggcaggaguggauacacaguacauguccaaugcaaugcuagcaaauuucaucaggggaccuuacuaguagucaugauaccagaacaucaauuggcaagugcacauacugguaauguaacagcugguuauaauuucacucauccaggagaaaaggguaggacuguuggagaucgucgugaccaccaugacaaacaaccuagugaugacaauugguugaauuuugaugguacuucacuggguaaugcacuaauauuuccccaucaauuuauuaauuugaggaguaauaauucagcaacuauaauaguaccuuaugucaaugcagucccaauggauucaaugcuuaggcacaauaauuggaguuuaguaauaauuccuauuaguccuuuaaagucagacccuagugcuagugcuuuaguuccuauaacuauuucuaucaguccaauguuugcugaauuuucuggggcacgugcuaaaacugccgcagccaaucaaggacuaccaguguauguuacaccugguucuggucaauuuaugacaacugaugaucugcaaucaccauccgcauuaccgugguaucauccaaccaaagaaauccuaauaccaggagaggucaaaaaucuaauagaaaugugccagguagauucacugauuccaaucaacaauaccacugcaaauuuaaggaaaguaaauauguauacaauacaauuggcaaaccaaacuaauauggcugaagaaaucuuugcaauuaagguggacauugcaucacaaccucuuucaaauacuauaauuggagaaauugcuaguuacuucacacauuggacuggaagccugcgguucaguuuuauguucuguggcacugcaaauacuacccuuaaauuguuauuagcauauacaccaccaggcauaaagaaaccaacaaacaggaagcaggcaaugcuugguacacacauuguuugggauauuggguuacaaucaaccguaucucugguuguuccaugggucagugcuagccauuucagguacaccacuccagauacauauucagcagcuggauacauaacaugcugguaucaaaccaacuuuguguucccaccaaacacaccgagcacugcagauauguuguguuuugugucagcauguaaagacuuuugccugcguauggcuagagauacaaauaugcacauacaaagugaugccauuacacaaaauccaguugaaaauuacauugauaauguacuuaaugaaguccuagugguacccaacaucagagaaagucauccaagcaccucuaacucugccccaauucucgaugcagcugagacuggucauaccaguaguguacaaccagaagauacgguugaaacacgauaugugcaaacaucccagacgagagaugaaaugaguauugaaaguuuucuuggcaggucagguuguauacacaccucaacaauaacuguuaauaauacaagacccuacaaugaacacacuuuugacacauggcaaauaacucuacaagaaauggcccaaauuagaaggaaauuugaaauguuuacauauguuagauuugacucagaagucacuuuaguaccuugcaucgcaggcaagggcgaugacauaggucacauaguuaugcaauauauguaugugccaccuggggcuccaguaccaacuaagagagaugauuuugcuuggcagucgggaacaaaugcaucagucuucuggcaacauggacaaccuuucccuagauuuucuuuacccuucuuaagcauugcaucugcuuacuacauguucuaugaugguuaugauggugauacacaugacucacguuauggcacaacagugauaaaucacaugggcacuuugugcaugcgaauagucacaaaccagcaagcacaugagguggaaauuaccaccaguguuuaucacaaagccaagcaugucaaagcaugguguccaagaccacccagagcuguaccauauacacaugcccauuccacaaauuacaaaccacauggcaaagaauuacaaauauuuauuaggucuagagaugaucccaaaguaguaacugcuggaccaagugauauguauguccauguugguaauuuaauuuauagaaacuuacaccuuuucaauucagaaaugcaugauucaauucuaguaucauacucuucagauuuagucauuuaccgaacaaacacuauagguaaugacuacauccccacuugugauugcacugaugccacuuauuauuguaaacauaaagacagguacuaccccaucaaaguuacuagucacgacugguaugagauucaggaaagugaauauuaccccaagcauauucaauacaaucucuuaauuggagagggaccaugugagccuggugacuguggaggaaaguuacucuguaaacauggaguaauuggaauaauuacugcugguggagaggggcauguggcauuuauagaucucaggcaauuucauugugcggaugaacaaggaauaacugacuacauccacauguugggugaagcuuuuggaacagguuuuguggacagugucaaagagcaaauaaaugccauaaacccaauaaauaacauaaguaagaaaauaauaaaauggcuucuuagaauuauaucugcaaugguaauaauuauuagaaauucaucugauccacagacaauuauagcaacuuuaacucuaauuggauguucaggcucaccauggagauuucuuaaggaaaaguuuuguaaauggacccaacuuacuuauauucauaaagaaucugacucauggcucaaaaaauucacggaaauguguaaugcagcuagagguuuggaguggaucgggaauaaaauaucuaaauuuauugaguggaugaaguccauguuaccccaagcucagcuuaaaguuaaguaucugagugaacuuaaaaaacuaagcuuccuggagaaacaaauggaacaccucagaguugcugauucaaaaacccaagagaagauuaaacaugagguggauacucuucaugaccuuucauguaaauuucuaccacucuaugcuagugaggcuaaaagaauuaagauuuuacacaauaaguguaauacaaucaucaagcaaaggaaaagaugugagccaguagcaguugugauacauggugaacccgggacugguaaaucaaugaccacaaacuuucuagcuaggaugauaacaagugagagugauaucuauucucuaccaccugaucccaaauacuuugauggauaugaucaacagaguguaguuauuauggaugaugugaugcagaacccaaguggagaagacaugaccuuguuuugccaaaugguaucaaguguuacauucauaccacccauggcagaucugccagauaaggguaagccauuugauucuagauuuguguuauguaguaccaaucauaaucuauuagcaccuccaacaauaacaucuuuaccagccaugaauaggagauuuuucuuugaucuagauaucauagugugugaaaaguacaaagacccacaaggcaaauuaaaugugacugcugcuuuccgaccaugugauguggaugcaaaaauuggcaaugcacgcuguuguccauucauuuguggcaaagcagugauguucagagaccgcaauacaugccaaacuuacacacuagcacaaguguacaaucgaauacuugaugaagauaagcggcguagacaggugaucgaugucauggccgcaauuuuucagggacccaucacucuugagggaccaccaccagcugcaaucagcgacuuauugcagucagucagaacuccugaaguaauuaaauacugugaagguaacaaauggaucauaccagcggaauguaagguugagagggaucuuaauauagcaaacaccaucaucacaauuauugccaauaucauuaguauuucuggaauuauuuauguuaucuacaagcuauucuguacauugcagggaccauauucaggggaaccuaaaccaaaaaccaagauaccagaaagaagagugguggcucaggguccagaagaggaguuuggaagaucacucauuaagcacaacucauguauugugacaacacaaaaugguaaauuuacaggcuuaggaauuuaugacagaauguuaauuuuaccaacacaugcagacccuggccgugaagugcaaauagaugguauuacaaccaagguggaagauucuuuugaccuguacaacaaggaugggguuaaacuagagauuacugugcuuaaacuaaagagaaaugaaaaauucaaagauauuaggaaauacauaccugaaaaugaagaugacuauccagauuguaaucuagcucuuucugcuaaucaaccagaaacuacuauaaucaauguaggggaugugguauccuauggaaauauucuccuuaguggcacucaaacagcuagaaugcucaaauauaauuacccaacaaaaucagguuauuguggugguaucuuguauaaaauuggacaagucuuaggaauccauguuggagguaaugggagggauggauucgcugccaugcuauugagaucuuacuuuucugaaacacagggugaaauaauaauuucaaaauccacaagcgaauguggguuacccaguauccacacaccaagcaaaaccaaacuucagccuaguguauucuuugauguauuuccagguacuaaagaaccagcuguccucucaaguaacgauccuagauuagagguugauuuuaauaaagcuuuguuuucuaaguauaaaggaaauaaugaguguguuauaaaugaucauguuaaaguagcugucucucacuacucagcccaacucaugaccuuagauauuaauccagagccuaucucacuugaggacagugucuuuggaacagaaggcuuggaagcucuugaucuuaacacuagugcaggauuuccauacgugucgaugggcauuaaaaagaaagaucuaauuaacaagcaaacaaaggaugugacuaaacuuaaaauggcccuagacaaguaugguguugacuuaccaaugguuaccuuucuuaaagaugagcuuaggaaaagagagaaaaucaccgccggaaagacccgcgugauugaagcuaguagugugaaugacacuguacuguucagaacaacuuuugguaaucucuucucaaaauuucacuuaaauccaggcauugucacagguucugcuguaggcugugauccugaaacauucuggucaaaaauaccuguuaugcuagauggagaauguauaauggcauuugauuacacaaauuaugauggaaguauacauccuaugugguuucaagcucuuaaagaaguuuugucuaauuuaucuuuugaggcuaguuuaauagauagacugugcaaauccaagcacaucuucaagaauauguauuaugaaguggaagguggaguuccaucagguuguucuggaaccaguauauuuaauacaaugauaaauaauaucauuaucagaacauuagugcuagaugcuuauaagaauauugacuuggauaaacuuaaaauuauagcuuauggagaugauguaauuuuuucuuacaaauaucaacuugacauggaagcaauugccaaggaggguaccaaguauggauuaacaauaacaccagcugacaaaucugauacuuucaaacaacuuaauuauggcaauguuacauuccugaaaagaggauuuaaacaagaugagaaauaucaguuuuugauacacccaacauuuccaguugaagaaauucaagagucuauucgauggacaaagaaaccaucccaaaugcaggaacauguccugucguugugucauuuaauguggcauaauggcaggaguguuuacaagcaguuugaggagcggauacgcaguguuagcgcuggucgugcacuguacauuccuccuuacgauuugcugcugcaugagugguaugaaaaguuuuaaauuguuuagauauaaaaauauuaaacaauuaguuuuuuaguuuuau

SEQ ID NO: 9 - RNA, 7143 nt, Human rhinovirus
uuaaaacugggucuggguuguucccacccaaaccacccacgcgguguaguacacuguuauuccgguaacuuuguacgccaguuuuauauccccaccccccuuuuguaacuuagaaguuaugcacacugaccaauagugggcaaucauccagauugucaucggucgagcacuucuguuuccccgguuugaguugauaugcuccaccagggcaaaaacaacucagaucguuauccgcaagaugccuacacagaacuuaguaccauucuggaaaauucuuggcuggucguucaauuacuaccccaguaauagaccuggcagaugaggcuagaaguuccccacuggcgacaguguucuagccugcguggcugccugcacacccuucuggggugugaagccuagaauuggacagggugugaagagucgcgugugcucaucuugaguccuccggccccugaaugcggcuaacccuaacccugcagccauugcccacaauccaguggguuuauggucguaaugagcaauugcgggaugggaccgacuacuuuggguguccguguuucacuuuuuacuuauuauuugcuuauggugacaauauauagauacauauauugacaccaugggcgcccaaguuucuagacagaauguuggaacucacucaacucagaauucaguuucaaaugguucaagccuaaacuacuuuaacaucaauuauuuuaaagaugcagcaucaaguggugcuucuaaauuagaguuuucacaagauccaaguaaauucacagauccaguuaaggauguauuagagaaaggaauccccacuuuacaaucuccaacaguugaggcaugugguuauucagauaggaucauccaaaucaccagaggcgacucuacuauaaccucacaggauguugcuaaugcagucguuggauauggcguauggccacauuaucuuacaccacaagaugcuacugccauagacaaaccaacuaggccugacacuuccucuaauagguucuacacauuggaaagucaguuguggacugcugaauccaaagguuggugguggaaacuaccugaugccuuaaaggacaugggaaucuuuggugagaacauguuuuaccacuuuuuggguagaaguggcuauaccguacauguucaaugcaaugccagcaaauuucaucagggaacucucuuaauagcaaugauaccagagcaucaauuggccacugcugcugguggaaguguuucugcaggauauaaauacacacauccuggugagaaagguagggauguuggcaagacaggccgagagagaaaugaccgacaaccuagugaugauaauugguuaaauuuugauggaacucucuugggaaaccugaccaucuucccacaccaauuuaucaaucucaggagcaacaauucagcuaccaucauaguaccauauguuaaugcaguaccaauggacuccaugcuuagacauaauaacuggagcuuaguaaucauaccuaucugugaacucaaaugcaauaacacugcuguuacuguaccuauuacaauaucuaucaguccuaugugugcugaguucucuggugccagagcuagaaauguuacucaaggauugccuacacugcugacaccuggaucaggccaauuccuuacaacagaugauuuccaauccccuagugcuuugccaugguaucacccaacuaaagaaauuucaauuccagggcaaguuagaaauuuaauugaauugugucaaguugauaccaugauaccaauuaauaacaccaaugauacuauuagggacaagaguauguacacaauuagacuugguggugugacaaaugcuaaggaagccauuuucgccaugagaguugauauugcaucccaaccuuuggcaacuacaaugauuggcgaaauuucuaguuauuauacacauuggacagggagccuccgauucaguuuuauguuuuguggcucugcuuuuacaacacuuaaauugcuuauugcauacacaccaccaggaaucacuguuccagagaauaggaaaaaagcuaugcuuggcacacaugucauaugggauguuggacuucaaucaacugugucaauggugguuccauggguuagugcuagucauuauagaaauaccacaccagauaccuauucugcagcuggauacaucacuugcugguaucaaacugacuugauuacaccuccaaacacagccccaguagcugacaugauauguuuugugucaggauguaaggauuucugccuucgcauggcaagggauaccaacuugcauaaacaaagugggguuauagcacaaaauccuguugagagguacguagaugaagucuugaaugaaguucuuguaguaccaaauauuagugaaaguaagccaaccacaucuaauucagccccagcuuuggaugcugcagaaacuggccauacaaguaguguacaaccagaggacaugguugaaacacguuauguucaaacuucacaaacuagggaugaaaugaguguugagaguuuucuaggaagaucuggcuguauauacaugcauaccaugaacauagauuaugaugcuuaugaugauucuguuaauaauuuugugaaauggaaaauaaguuugcaagaaauggcccaagugcgaagaaaauuugagcuguuuaccuauguaagauuugauucagaaauaacaauuguaccaugcauagcugggcaagguggugaugucggacauguuguuaugcaauacauguacguaccacccggugcaccccuuccaacaaagagaaaugacuacacauggcaaucugguaccaaugcaucuguuuuuuggcagcauggccaaaucuauccucgauucucgcuaccauuucuuaguaucgcuucugcauauuacauguuuuaugauggguauaauggagacuccacagaugcacguuauggaacaacagucacuaaugauaugggcacacuuugcuuuagaauaguaacugaggaacauaccaacaaggucaaagucacaacuagaaucuaucauaaggcuaagcauaucaaagcauggugcccuagaccucccagagcuguugaauacacuaaugugcauguuacaaacuacaaaccaaaaacaggagauguugcaguuuccauuguacccaggacaaauguuagggaaaucagaaacuuuggacccagugacauguauguacauguuggaaauuuaauauauagaaauuugcaucuuuucaacucagaaaugcaugauucaaucuuaguguccuauucaucagauuuagucaucuaucgaacaaacacuauaggugaugacuauaucccagccugugauugcacucaagccacauacuacuguaaacauaagaacagauauuauccaauuaauguuacuagucaugauugguaugaaauacaagaaagugaauauuacccaaaacacauucaguacaauuuguuaauuggugaaggccccugugaaccuggagauuguggagguaaauuacuguguaaacauggagugauuggaauuauuacagcugguggugaaggccauguggcuuucauugacuuaagacacuucuugugugcugaagaacaagguguuaccgacuacauacacaugcuaggugaagcuuuuggcaauggcuuuguagauaguguuaaagaacaugugaaugcaauaaaucccauaaacaauauuaguaaaaaagucauuaaaugguuacuaagaauuguaucugccauggucauaaucauuagaaacucuucagauccacauacaguuguugcuacucugacauuaauugguuguucugggucaccauggagauuucuaaaggagaaauuuuguaaauggacucaguugaacuauauccauaaagaaucugacucauggcuuaaaaaauuuacugaaaugugcaaugcagcaaggggccuugaauggauagguaacaagauaucuaaauuuauagaauggaugaaaucaauguuaccacaagcacaacucaaaguuaaguacuuaaaugaauuaaagaaguuaaacuuacuugaaaaacagguugaaaacuuaagaugugcugauaccaaaacccaagagaagauaaaaguugaaguagacacuuugcaugaucuauccugcaaauuucucccacuguaugcuagugaagcuaaaagaauuaaagucauuuacaacaaaugcagcaacaucauuaagcaaaggaaaagaagugagcccguggcagugaugauacaugguucaccugggacuggcaaaucuauuacaacaagcuuucuagcaagaaugauuacuaaugaaagugauauauauuccuuaccuccugauccaaaauacuuugaugguuaugaccagcaaaguguugucauaauggaugauauuaugcaaaacccugauggugaggauaugucacuauuuugucaaaugguuucuagugucacuuuuauuccgccaauggcugauuuaccagauaagggaaaaccuuuugacucaagauuuguuuugugcaguacuaaucauucucuuuuggcuccucccacaaucacuucccuucaggcaaugaacagacgguuuuucuuggacuuggauauugugguucaugauaauuauaaagaugcacaagggaaauuggauguguccaaagcauuuaagccaugugacauagacacaaaaauuggaaaugcucgcuguuguccauucauaugugguaaggcaguaaccuucaaagaccgcaacacuugccaaaguuacccauuaagccagauuuacaauuugauucuccaagaggacaagagacguacucauguuguggaugugaugacugcaauauuccaaggaccaauuucaauggaagccccuccuccuccugcuauagcugaccucuuacgcucugucaagacaccagaaguuaucaaauauugugaagacaauaaauggauuaucccagcugacugcaggauugagcgugacuuaaaccuugcaaacaacaucauaacaauuauugcuaauauaauuagcauagcaggcauuauauauaucauauauaaguuauuuuguucuuuccaaggcccuuacucaggugagcccaaacccaagacaaaaauuccagaaagaaggguaguugcgcaagguccagaagaggaauuuggacgcucaauaaucaaacacaacacaugugugguuacuacugacaauggcaaauucacuggauugggaaucuaugacaaacuuaugguauuacccacacaugcugauccuggcaaagagguuugcaucaauggaauuacaaccaaaguuagugauucauaugauuuauauaacaaacaagguguuaaauuagagauuacagcuauaguauuagauagaaaugagaaauucagggauauacgaaaguauauaccagagagagaggaugauuacccugauugcaauuuagcccuuguagcuaaucaaccagaacccaccaucauaaauguaggagauguuauuuccuaugggaacauccuacuuagugguaaucagacagcacggaugcuuaaauauaacuaucccacaaaaucaggcuauuguggugguguucuauacaaaauaggucagaucauagggauucaugugggagguaaugguagagauggauuuucugcaauguuacucagauccuauuuuaaucaaacucaaggagaaauaacaguggcaaagaaaguagccgaaugugggcuuccaacaauacacaccccauccaaaaccaaauuacaacccagugucuucuuugaugucuuugaggggucuaaggaaccagcuguucuaacagauaaggauccucgauuaacuacugauuuuaauaaagcuuuauuuucuaaguauaaggguaauauagaauguaguaugacugaucauaugagaguugcuauaucacauuauucagcucaauugaugacuuuagacauugacucaguaaauauaucuuuagaagagaguguauuuggcacugaaggucuagaagcccuugaucuaaauacaagugcagguuucccauauauaaguaugggaauaaagaaaagagaccuaauaaauaacaccacaaaagacauaacuaaauugaaguuagcacuugacaaguaugggguugauuugccaauggugacauuucuuaaagaugaacuuaggaaaaaagagaaaauauccacuggaaaaacaagagucaucgaagcuaguagugugaaugauacaauagccuuuagaguaguguauggaaaucuauuuucuucuuuccacaaaaauccuggaguagucacaggaucugcuguagggugugacccugaaacuuuuuggucaaaaauaccaguaauguuagauggggauuguauaauggcauuugauuacacuaauuaugaugguaguauacacccaauuugguuugaagcucuuaaacaaguuuuaagaaacuugucauuugaagacaaacuuauagacagauuguguaaaucaaagcauauauucagagacacauacuaugaaguugaagguggagugcccucaggcuguucaggaacuagcauauuuaauacuaugauaaauaauauuaucauuaggacuuuaguucuugaugcuuacaaacacauugauuuggauaaacucaaaauaauagcauauggugaugauguuauuuuuuccuacaaauacccuuuagacauggaggcaauugcuacagaaggaaacaaauacggucuaaccaucacaccggcugacaaaucagauacuuucaagaaacuugacuaugacaaugugacuuucuuaaaaagaggauuuaaacaggaugcuaaguacccauuccuaauucauccaacauucccaguuucugaaauucaugaguccauuagauggacuaagaaaccuucacaaaugcaggagcaugucuuguccuugugccauuugauguggcauaauggacgggauguauacaaugaauuugagaggaagauacguagcgugagcgcuggacgcgcgcuauauaucccuccauaugagcuacuccugcaugagugguaugaaaaauucugaauuauaaauauagaaauauuaaauauuuaguuuuuuaguucuau

SEQ ID NO: 10 - RNA, 7140 nt, Human rhinovirus
uuaaaacuggguucggguuguucccacccaaaccacccacgugguguaguacacuguuaucccgguaacuuuguacgccaguuuuaucuccccacccccuuuuguaacuuagaaguuaugcacaaugaccaauagugggcaaucauccagauugucaucggucgagcacuccuguuuccccgguucaaguugauaugcucuaacagggcaaaaacaauuugaaucguuacccgcaaggugccuacacagaacuuaguaccauucuggaaaauucuuggcuggucgcucaguuacuaccccaguaauagaccuggcagauggggcuagaaguuccccacuggcgacaguguucuagccugcguggcugccugcacacccuucuugggugugaagccuagaauuggacagggugugaagagucgcgugugcucaucuugaguccuccggccccugaaugcggcuaacccuaacccugcagccauugcccacaacccagugggucuauggucguaaugagcaauugcgggaugggaccgacuacuuuggguguccguguuucacuuuuuacuuauuauuugcuuauggugacaauauauagauacauauauugacaccaugggcgcccaaguuucuaggcagaauguuggaacucacucaacucagaauucaguuucaaaugguucaagccugaauuacuucaacaucaacuacuuuaaggaugcagcaucaagcggugcuucuaaauuagaguuuucacaagauccaagcaaauucacagauccaguuaaggauguacuagaaaagggaaucccuacuuugcaaucuccaacaguugaagcaugugguuauucagauaggaucauucaaaucaccagaggugacucuaccauaaccucacaagauguugccaaugcagucguugguuacgguguauggccacauuaucuuacaccacaagaugccacugccauagauaagccaacuagaccugacaccucuuccaauagguucuauacacuaaaaagucaguuguggacugcugaauccaaaggcuggugguggaaacugccugaugcccuaaaagauaugggaauuuuuggagagaauauguuuuaucacuuuuuagguagaugugguuacacugugcauguucaguguaacgcuagcaaauuucaucagggaacucuuuuaauagcaaugauaccagaacaucaauuggccacugcugcugguggaaguguuucugcaggguauaaauacacacauccuggugagaaagguagggauguugggaagauaaaccgagagagaaaugaccggcagcccagugacgacaauugguuaaauuuugauggaacucucuugggaaaccugaccauuuucccacaucaguuuauuaaucuuaggaguaacaauucagcuacuaucauaguaccauauguuaaugcaguaccaauggauuccaugcuuaggcauaauaacuggagccugguaaucauaccuaucugugaacucaagugcaauaacacugccgucacuguacccaucacaauaucuaucagcccuaugugugcugaauucucuggugcuagagcuaggaauguuacucaaggucugcccacacuguuaacaccugggucaggucaauucuugacaacagaugauuuccaguccccuagugcuuugccgugguaucacccaacuaaagaaauuucaauuccagggcaagucagaaauuuaauugaauugugucaaguugauacuaugauaccaauuaacaacaccaaugauaauauuagagauaaaagcauguacacaauuagacuuggugguguaacaaaugcuaaggaagccauuuucgcaaugagaguugauauugcaucucaaccuuuggcaaccacaaugauuggugaaauuuccagcuauuacacacauuggacagggagucuccgauucaguuucauguuuugugguucugcuuuuacaacacuuaaauuguugauugcauacacaccaccaggaaucacuguuccagaaaacaggaaaaaagcuaugcuuggcacgcauguuauaugggaugucgggcuucaaucaacugugucgauggugguuccaugggucagugcuagucauuacagaaacacuacaccagauacuuauucugcagccggauacaucacuugcugguaucaaacugauuuaauaacaccuccaaacacagccccaguagcugacaugauauguuuugugucaggauguaaagauuucugccuucgcauggcaagggauacgaacuugcauaagcaaagugggguuauagcacaaaauccuguugaaagguauguagaugaagucuugaaugaaguucuuguaguaccaaauaucagugaaaguagcucaacuacaucuaauucagcuccagccuuagaugcugcagaaacuggccacacaagcaguguacaaccagaagacaugguugaaacacguuauguccaaacuucacaaacuagggaugaaaugaguguugagagcuuuuuaggcagaucugguuguauacacaugucuaccaugaacauagauuauacuaauuaugaugauucuguuaauaauuuugugaaauggaaaauaaguuugcaagaaauggcccaagugcgcagaaaauuugaguuguucaccuauguaagauuugauucagaaauaacaauugugccauguauagccgggcaagguggugaugucggacauguuguuaugcaauacauguauguaccgcccggugcaccccuuccaacgaagagaaaugauuacacauggcaaucuggcaccaaugcaucuguuuucuggcaacauggucaaauuuacccccgauucucuuuaccauuucuuaguauugcaucugcauauuauauguuuuaugauggauauaauggagauuccucagaugcacgcuaugggacaacaaucacuaaugauaugggcacacuuugcuucagaauaguaacugaagaacauacuaacaaggucaagguuacaacuagaaucuaucauaaagcuaaacaugucaaagcaugguguccuagaccucccagagcuguugaauauacuaaugugcauguuacaaacuacaaaccagggacaggagauguugcagucuccauuguaccuagagcaaauguuagggaaauuagaaacuuuggacccagugacauguaugugcauguuggaaauuuaauauauagaaauuugcaucuguucaauucagaaaugcaugacucaaucuuaguauccuauucaucagaucuagucaucuaccgaacaaacacuauaggugaugacuacaucccauccugugauugcacucaagccacauacuacugcaaacauaaaaacagauauuauccaauugaaguuacuagucaugauugguaugaaauacaagaaagcgaauauuacccuaaacauauucaguacaaucuguugauuggugaaggcccuugugaaccuggagacugugggggcaaauuacuauguaagcauggagugauuggaauuaucacggcugguggcgagggucauguggcuuucauugacuugagacacuucuugugugcugaggagcaagguguuacugacuauauacauaugcuaggugaagcuuuugguaauggcuuuguagauaguguuaaagaacaugucaaugcaauaaaucccauaaacaauaucaguaaaaaagucaucaaaugguuauuaagaauugugucugcuauggucauaaucauuaggaauuccucagauccacacaccgucguugcuacucuaacacuaauugguuguucuggcucaccauggagauuuuugaaagagaaauuuuguaaguggacucaguuaaacuauauccacaaagaaucugacucauggcuuaaaaaauuuacugaaaugugcaaugcagcaagaggccuugaguggauagguaauaagauaucuaaauuuauagaauggaugaaaucaauguuaccacaagcacaacucaaaguuaaguauuuaaaugaauuaaagaaauuaaacuugcuugaaaaacagguugaaaacuugagaugugcugauaccaaaacucaagagaaaauaaaaguugaaauagacaccuugcaugaucuauccugcaaauuucucccacuauaugcuagugaagccaaaagaauuaaagucauuuacaauaaaugcaauaacaucaucaaacaaaggaaaagaagugaaccuguggcaguaaugauacaugguuugccugggacugguaagucuauuacaacaaguuuucuagcaagaaugauuacuaaugaaagugacauauacuccuugcccccugacccaaaguacuuugaugguuacgaucagcaaaguguuguuauaauggaugauauuaugcagaacccugauggugaggauaugucacuauuuugucaaaugguuucuaguguuaccuucauuccgccaauggccgacuuaccagacaagggaaaacccuuugacucaagauuuguucugugcaguacuaaucauucucuuuuggccccucccacuaucacuucucuucaggcaaugaacaggcgguucuucuuggacuuggacauugugguucaugauaauuauaaagaugcacaagggaaauuggauguguccaaagcauuuaggccaugugauguuaagacaaaaauuggaaaugcucgcuguuguccauucauaugugguaaagcaguaaccuucaaagaucguaacacuugccaaaguuacccauugagucagauuuacaauuugauucuugaagaagacaaaagacgcacucauguuguagaugucaugacugcaauauuccaagggccaauuucaauggaaguccccccuccuccugcuauaacugaccucuuacgcucugucaagacaccggaaguuaucaaauauugcgaagacaauaaauggauuauuccggcugauuguaaaauugagcgugacuugaaucuugcaaauaauauuauagcaauuauugcuaauauaaucagcauagcagguauuauauacaucauauacaaauuguucuguucuuuccaaggccccuacucaggugagcccaagcccaagacaaaaaucccagaaagaagggugguugcacaagguccagaagaagaguuuggucgcucaauaaucaaacacaacacaugugugguuacuacugauaauggcaaauucacuggauugggaaucuaugauaaacucaugauauuacccacacaugccgauccuggcaaagagguguguaucaauggaauugcaaccaaaguuagugacucauaugauuuauauaacaaacaagguguuaaauuagagaucucagcuauaguauuagauagaaaugagaaauucagggauauacgaaaauacauaccagagagagaggaugauuacccugauugcaacuuagcccuuguagcuaaccaaccagaacccaccauuauaaauguaggagacguuaucuccuaugggaacaucuuacuuaguggcaaucaaacagcacggaugcuuaaauauaauuaccccacaaaaucaggauacuguggugguguucuauauaaaauaggucagauuauagggauucaugugggaggcaaugguagagauggguuuucugcaaugcuacucagaucuuauuuuaaccaaacucaaggagaaauaacagugacaaagaaaguuacugaaugugggcuuccaacaauacacaccccauccaaaaccaaguugcaaccuaguguuuucuuugaugucuuugaaggguccaaggaaccagcuguccuaacugauagagauccucgauuaaccacugacuuuaauaaggcuuuauucucuaaauauaaggguaauauagaauguagcaugacugaucauaugagaguugcuguaucacauuauucagcucaacuaaugaccuuagauauugauucaguaaauauaucuuuagaggaaaguguguuuggcacugaaggucuggaagcccuugauuuaaauacaagugcagguuucccauauauaaguaugggaauaaagaaaagagaucuaauaaacaacagcacaaaagacauaaccaaauuaaagcuagcacuugauaaauaugggguugaucuaccaaugguaacauuucuuaaagaugaacuuagaaagaaagaaaaaauaucuacuggaaaaacaagagucauugaagcuaguaguguaaaugauacaauagccuuuagaguaguguauggaaauuuguuuucuacuuuucauaaaaauccugguguaguuacaggaucugcaguagggugugacccugagacuuuuuggucaaaaauaccaguaauguuagauggggacugcauaauggcguuugauuacacuaauuaugaugguagcauacacccaauuugguuugaggcucuuaaacaaguuuugauaaauuuaucauuugaagacaagcuuauagacagauuguguaggucaaaacauauauucagagacacauauuaugaaguugaaggugggguacccucagguuguucaggaacuagcauauuuaacacuaugauaaauaacauuaucauuagaacuuuaguucuugaugcuuauaaacauauugauuuggacaaacucaaaauaauagcauauggugaugauguuauuuuuuccuacaaauacccuuuagacauggaggcaauugcuauagaaggaaauaaguacgguuugaccaucacaccggcugacaaaucagauacuuucaagaagcuugauuaugacaauguaaccuucuuaaaaagggguuuuaagcaggaugcuaaauacccauuccugauucacccaacauuuccaguuucugaaauccaugaguccaucagauggacuaagaaaccuucacaaaugcaggaacaugucuuguccuugugucacuuaauguggcauaauggacaggauguguauaaagaauuugagaggaagauacguagcgugagcgcuggacgugcgcuauauaucccuccauaugaauuacuccugcaugagugguacgaaaaauucugaauuauauauagaaauauuaaauauuuaguuuuuuaguucuau

SEQ ID NO: 11 - RNA, 7119 nt, Human rhinovirus
uuaaaacugaauccagguuguucccaccuggauuucccauguggaguaguacacuguuauuccgguaacuuuguacgccaguuuuauaaccccuuccccuuauguaacuuagaagauaagcacaaagaccaauaggugguggcuaucccagucacuaaaggucaagcacuucuguuuccccggucaacguugauaugcuccaccagggcaaaaacaaccgagaucguuauccgcaaagugccuacgcaaagccuaguagcacuuugaauagcaugugguuggucgcuccacuauuccccauaguagaccuggcagaugaggcuagaaaucccccacuggcgacaguguucuagccugcguggcugccugcguguccuaacggacacgaagccauauguuugacaaggugugaagagccccgugugcucacuuugaguccuccggcccccgaauguggcuaaccuuaacccugcagcuggggcauacaauccagugugaacucagucguaaugagcaauugcgggaugggaccaacuacuuuggguguccguguuucacuuuuuuuuauaaugcuuauggugacaauauauaauaauuuguauauuggcaccaugggcgcacaaguauccagacagaacguugguacacacucuacucaaaauucaguuucgaauggcucaaguuugaauuauuuuaacaucaacuauuucaaggaugccgcaucgcauggugccucaaaauuagauuucucucaagauccaaguaaauucacugacccaguuaaggauguguuagaaaaggguauucccacgcuucagucuccaacuguugaggcguguggauauucugauagaaucauucaaauaaccagaggagacucuacaaucacuucccaggauguggcaaaugcagugguuggguauggaguuuggccccacuacuugacaccacaagaugcuacagcaauugauaaaccaucaagaccugacacuucauccaauagauucuauacacuggagaguaaaacuugggauaguucaucuaagggauggugguggaaacuuccagaugcacuuaaagacaugggcauauuuggugagaacauguauuaccauuucuugggaagaagugguuauacaguacauguccaaugcaaugcuaguaaauuucaucagggcacacugauuguagcaaugauaccagagcaucaacuggccagugcaauuggagggaacguuacugcuggauacaaauacacccauccuggagaaagagguagagucauuaauguagcaagucguggagacaaugaaaaacagccuagugaugacaauuggcucaacuuugauggaacauuauuaggcaauaucacaauauacccacaucaacuuaucaacuuaagaaguaacaauucagccacaaucauagugccuuauguuaaugcuguaccaauggauucaaugcucagacauaacaauuggagucuggugauuauacccauaugucaauuagagggagauccaccaacaauaccaauaaccaucuccauuaguccuaugugugcugaguuuucaggaguccgugcucguagccaaggucuaccagccaugcuaaccccugggucuggacaauuuaugaccacagaugauuuccaauccccuugugcuuuaccuugguuccauccuacuaaagagauaucuauaccaggccagguuaggaacuuaauugaguugugucaaguggacacuuugauuccgauaaacaacuugcaagcaaauauuacaaauuuagacauguacucagugguuuuaaauagagaaauagacccagcaaaggaagucuuugcaauaaaaguugacauugccucccagccauuagccacuacauuaauuggagagauaucaagcuauuauacccauuggacuggcagucuuagguuuaguuuccuauucugugguucagcuaauaccacacuuaaacuccuaguggcauacacaccaccaggaauugccaaaccagcagauaggaaggcagccaugcuaggaacucauguuguuugggauguuggauuacaauccacuaucucuaugguugugccauggguuagugcuagucauuuuagaaacacaaccccugauacauauucgcuggcuggauacauaacaugcugguaccaaacaaaccuuauugcuccaacaaaugccccacaaacugcaagaaugcuguguuuugucucagccuguaaggauuuuugcuuaagaauggcacgugacacuaaucugcacacacaaucuggcacuauugaacaaaauccaguagagaauuauauagaugaaguacuuaaugaaguguuaguggucccaaaugugaaugaaagucacgcaauuacaucaaauucagccccugcuuuagaugccgcugaaacuggucacaccagcaaugugcaaccugaagauaugauugagacuagguauguacaaacaucacaaacaagagaugaaaugaguauagagaguuuucuaggcagaucaggguguauacauaucuccaaguuaguuguacauuaugaagauuauaaugcagaaacaaggaacuuuguaaaauggcaaauaaaucuacaggaaauggcccagauuaggagaaaauuugagauguuuacauauguuagauuugauucagaaauuacacuaguaccaucuguagcugcuaagggugaugacauaggacauauuguuaugcaguacauguauguuccuccaggagcaccaauaccaaaaaccagagaugauuuugccuggcaaucuggaacaaaugcaucaaucuucuggcaacauggucaaacauaccccagauuuucacuuccuuuccucaguauagcaucagcuuauuacauguucuaugauggcuacgacggugaccagaccucaucgcgguauggcacaguugcaacaaaugacauggguaccuugugcucuagaauagucacagauaaacauaagaaugagguggaaauaacaaccagaauauaccacaaggcaaaacauguuaaagcauggugcccaaggccaccgagagcuguggaguacacacauacacauguaacuaacuacaagccuaaggaaggaagagagaaaacugccauaguacccagagcaaggauuacaauggcugggccuagugacauguauguacauguagguaaccucauauauagaaauuuacauuuguuuaacucagaaaugcaugacucaauucuaaucucauacucaucagauuuagucauauaccgaacaaacacaacaggugaugacuacauuccaacaugugauugcacagaugcuacuuauuacugcaagcacaagaauagauacuauccaauuaaaguuacuagucaugauugguaugaaauacaagagagugaguacuacccaaaacauauccaauacaauuuacugauuggagagggcccaugugaaccaggugauuguggggguaaacuauuaugcaaacaugguguaauuggaauaaucacugcugguggagaggggcauguggcauuuauagaucuuaggcauuuucaaugugcugaagagcaaggcauaacagauuacauccauaugcuuggugaagcguuuggcacagguuuuguugacagugucaaagaucaaauaaaugcuauuaaccccauuaacaacauuaguaaaaagauaauuaaaugguuacuuagaauaauaucagcaauggucauaauaauuagaaauucaucagauccacagacuauaauagcuacuuuaacauugauuggcugcucagguuccccuuggagauuucuuaaagagaaauuuuguaaauggacacaguuaaauuacauacacaaggaaucagauucauggcuuaaaaaauuuacugagauguguaaugcagcuagaggccuggaguggauuggcaacaagauaucaaaauuuauugaauggaugaaaucuauguuaccccaagcccaauugaaaguuaaauacuugagugaauuaaagaaauuaaguuucuuggagaagcaaauggaacaccugcggguggcugauucuaaaacccaggagaaaauuaaacacgagauugacacauugcaugauuuaucuuguaaauuucuaccccucuaugcuagugaggcaaaaagaauuaagauccuacacaauaaguguaacacaauuauuaaacaaaagaaaagaugugaaccaguggcuguugucauacauggugaaccuggcacuggaaaaucaaugacuacaaacuucuuagcuagaaugauaacaagugauagugauaucuauuccuuaccaccugaucccaaguauuuugaugguuaugaucaacaaaguguagucauaauggaugauauaaugcagaauccaaguggugaugacaugacucuauuuugucagauggucucgaguguuacuuuuauaccaccaauggcagauuugccagauaagggaaaaccauuugacucuagauuuguauuauguagcaccaaucauaacuuauuagcaccaccuacuauaaccuccuuaccagcuaugaauaggagauucuuucuugauuuagauauuauaguaugugacaaauauaaagacucacaagggaaacuaaaugugucugcagcuuuccaacuaugugaugugaauacuaaaguaggaaaugcccgcuguuguccuuuuauuuguggaaaggcuguaauuuuuagggacaggaauacaugccaaacuuacaccuuaucacaaguguauaaccuaauauuggaggaagacagaaagcggacgcggguuguugaugucauggcagcaauauuucaagguccaauaacacuugagggucccccaccagcagcuauuagugauuuauuacaaucaguuagaaccccugaaguaauuaaauauugugaagaaaacaaauggauaauaccugcugaauguaagguagaaagagauuugaauauagcuaacacuauaauaacaaucauugcuaacauuguuaguauaucugguauuauuuaugucauuuacaaacucuucuguacacugcaaggacccuauucuggugaacccaaaccaaagacaaaaauuccagagagaagaguaguggcacaagggccagaagaggaauuuggaagaucuuuaauuaagcacaacucaugcauugucacuacacaaaauggaaaauuuacaggccuaggcauauaugacagaacacuuauaauaccaacacaugcugauccagguaaagaggugcaaauagaugguaucacaacugaaguacaagauucuuaugauuuauacaacaaagauggagugaagcuagaaauuacaguucuuaaauuaaaaagaaaugagaaauuuaaagacaucaggaaauacauuccagaagaugaggaugauuauccagauuguaauuuggcuuugucagcaaaccagccagaaaccaccauuaucaacgugggggaugugguaucauaugguaacauuuuacuuagugguaaccaaacagcaaggaugcucaaauacaauuacccaacaaaaucaggguauuguggaggaauucuauacaaaauuggccaaguucugggcauucauguuggugguaaugggagagauggguuugcagcuauguuacuuagaucauauuucucagaaacucaaggccagauaguuucuuccaaauccacugcugaaugcaauuauccuagcauacacacaccaagcaagacuaaauuacaacccaguguuuuuuaugacaucuucccuggcaauaaagaaccugcuguacucucagaacaagauccuagauugaaaguugauuuuaaagaggcuuuauucucuaaauacaaaggaaauaauccaugugagauaaaugaacauauuaagguagcagucucucauuauucagcacaauuaaugacauuagauauugauccaagucccauuuccuuagaagaugguguuuucgguauggaggguuuagaagcacuagaccuuaauaccagugcaggauuucccuauguuuccaugggcauuagaaaaagagaucuaaucaacaagcaaaccaaagauauuacaaaauuaaaguuagcacuagacaaguauggugucgaccuucccauggucacauuccuuaaggaugagcuuaggaagaaagaaaaaaucucugcugggaagacucgagucauagaagccaguagugugaaugacacuguauuauuuaggacaacuuuugggaaucuuuucucaaaauuucauuugaauccugggauuguaaccggcucagcugugggaugugauccagagacauuuuggucuaagauaccagugauguuggauggugaguguauaauggcuuuugauuacacaaauuaugaugggagcauacauccaauaugguuucaagcacucaaagaaguacugucuaaucugggguucaauccuaauuuaauugacagauuaugcaagucaaaacacauuuuuaaaaauaucuauuaugagguugaaggaggagugccaucuggauguucuggaacaagcauauucaacacaaugauuaacaacauuaucauuagaacacuaguuuuggaugcauacaaaaacauugauuuggauaaauuaaaaauaauagcauauggggaugaugucauauucucauauaaguaccaauuggacauggaagcaauugcuaaggaagguaccaaguauggucuuaccauaaccccagcugacaaaucaagugaauuuaagcaauuagauuauagcaaugugaccuuuuugaagagaggauuuagacaagaugacaaauaccaauucuuaauacacccaacuuuuccaauugaagaaauacaugaguccauacgauggaccaagaaaccaucucaaaugcaggaacauguguugucguugugucauuuaauguggcauaauggcaaaaacguguacaagcaguuugaacaaaggauacgcagugucagcgcuggacgugcacuguauaucccucccuacgaacugcuucugcaugaaugguacgaaaaauuuugaauuguuuagauauagaaguaauaaacaauuaguuuuuuaguuuuau

SEQ ID NO: 12 - RNA, 7135 nt, Human rhinovirus
uuaaaacuggaucuggguuguucccacccagaucauccacgugauguugugcucuauuauuccgguaauuuugcacgccaguuuuucaucccuucccccuuuguaacuuagaagacuuaaacaaaugaccaauaggaagcaacaaaccaguugcgauaggucaagcacuucuguuuccccggucaauguugauaugcuccaacggggcaaaaacagcagcgaucguuauccgcaaggugccuacgcaaagccuaguagcgcucuugaaauuguuugguuggucgcucaaguacaaacccaguacuagaccuggcagaugaggcuagaaaacccccacuggcgacaguguucuagccugcguggcugccugcacacccauuugggugugaagccaaacaacggacagggugugaagagccacgugugcucaucuugauuccuccggccccugaaugcggcuaaccuuaaaccugcagccauugcucacaauccagugaguugguggucguaaugagcaauugcgggaugggaccgacuacuuuggguguccguguuucacuuuuuaccuuguuuuaugcuuauggugacaauauauaguaguauauauugacaccaugggcgcucagguaucuagacagaauguugguacacacuccacacaaaacucaguuucuaauggaucuagcuugaauuauuuuaacauuaauuauuucaaagaugccgcuucuaguggugcuucaaaauuagaauuuucucaagaucccaguaaauuuacagacccagugaaagauguuuuggaaaaaggaauacccacacuacaaucaccaacuguugaagccuguggauacucagauaggauuauacaaaucaccagaggcgauuccacaauaaccucacaagakguugccaaugcuguuguuggguaugggguuuggccucauuauuuaacaccugaagaugcgacagccauugauaagccuucacaaccagacaccucuacaaacagauucuauacucuagagaguaaaguuugggauucugaaucaaaaggauggugguggaaacuaccugaugcucuuaaagacauggguguuuuugggcagaacauguacuaccacuuccuuggaaggaguggguauacaauacauguucaaugcaaugccagcaaauuucaucaaggaacacucauaguagcugccauaccagaacaccaauuggcuagugccacaaaaggaaauguuacugcuggguacaauuacacacauccuggugaaaugggcagagauguagguaagauugguagagaaaacaauggaaaacaaccuagugaugauaauuggcuuaacuuugauggaaccuuauugggaaauauaacaaucuuuccccaucaauuuauaaauauaagaagcaauaacucagcuacuuuaauucucccauaugucaaugcagucccuauggauucuaugcuuagacacaacaacuggaguuuaguuauaauuccuaucugcccacuugaaucacaggguacggaaggugugguuccuauaacuguauccauaaguccaauguuugcugaauuuucuggagcucgugcaagaagucaagguuuaccagucaugaucacgccaggcucuggucaauuuaugaccacagaugacuaucaaucaccuagugcccuaccaugguuccauucuacuaaagaaauaucaauaccuggccagguaagaaauuuagcagaauugugccaaguugacacaaucaucccaaucaaucacacuacagcaacaacgucuagugucaacauguauacuguaguguuggacaagaaaacaagcuuggcagaagaaguauuugcuaucaaaguugacauugcuucacagcccuuagcaacaacucuuauaggugagaugucuagcuacuauacacacuggacugguagucuucgcuuuaguuuuauguuuuguggaacagcugguacuacucuuaaauuauuacuugcuuacaccccuccagguauugcaaaaccacagaagagaaaagaugccauguugggcacgcauguuguuugggauguugguuuacaaucaacuaucucaaugauuguaccauggguuagugcaagccauuaucgaaauacaacuccagacacuuucucacuggcagguuauauaacauguugguaucagacuaaucuuguuacuccacccaacacaccuuccacagcuagaauguugugcuucguuucaggaugcaaagauuuuugcuuacgcauggccagagacacgaacuuacauaagcaaacagguaccauuacacaaaauccuguagagaaauauguggacaccauucugaaugaggugcuaguugucccaaauaucaaugaaagucauccaaguacaucaaaugcugcuccugccuuagaugcagccgagacaggacauacuagcaauguacagccugaggacaugaucgaaacacgcuauguucaaacgucccagacuagggaugaaaugagcauagaaaguuuucuuggcagauccgguuguguacauguuucagagcuccaauuagauuauaccaauuacaaucaagaaaauaauaauuucaaaacuuggcaaauaaacuugaaagaaauggcacagauuagaagaaaauuugaacuuuucacuuaccucagauuugauucagagguaacauuagucccuugcauagcugcuaaaaguaaaaacauuggacauguuguuaugcaauacauguaugugccuccuggugcuccuaucccaaaaacuagaaaugauuacacauggcaaucagguacuaaugcaucuauauuuuggcaacauggucaaccauacccaagauuuucauuaccuuuucuaaguauagcuucugcauauuacauguuuuaugauggguaugauggagauucaccaggaucccgcuauggaacaauaguaacuaaugauaugggaaccuuaugcuccagaauaguaacugaugaacaccaaacacagguugcaaucacaacuagaguauaucauaaagcuaaacauauaaaagcuuggugcccacgaccacccagagccguggaauauacccacacucaugugacuaauuauaaaccccagacaggugaagucacucuuccaauugaaauaagagauaacccuagacauauaaagaauguaggaccuagugauauguauguucaugugggaaauuugauuuacagaaauuuacauuuauuuaauucagauaugcaugauucuauauuagucucuuacucaucggauuuaguuauuuaccgaacaaacacuguaggugaugacuauaucccaacuugugauugcacagaugcaacauauuacuguaaacauaaaaacagauacuucccaauuaaaguuaccagucaugauugguaugagauucaagagagugaauauuacccuaaacacauccaauacaaucuuuuaauuggugaggguccaugugaaccuggugauugugggggaaaauuacuaugcaaacauggagugauugguauuaucacagcugguggugagggucauguugcauuuauagauuuaaggcauuuccacugugcagaagagcaaggaaucacugauuacauacauaugcugggggaggcuuuugguaaugguuuuguggauagugugagagaucaagugaaugcuauaaauccaauuaauaauauuagcaagaaacuuaucaaauggaugcuuagaauuauaucugcaauggugaucauuaucagaaauucuucagauccucaaacaauaguugcuacauugacauugguagguugcucagguucaccauggcgcuuucucaaggaaaaauuuuguaaauggacucaacuaaauuacauccauaaagaaucagauucauggcucaagaaauuuacagaaauguguaaugcugcuagaggacuugaguggauuggaaauaaaaucucuaaauucauugauuggaugaaaucuauguugccacaagcacagcucaagguaaaauaucuuagugagcuuaaaaaauuaggauuucuugaaaaacaaauagaaaaucugcguugugcugacacaaaaacucaggagaaaauaaaauuggagauagauacacuacaugaucuuuccuguaaauuucuucccuuguaugcaagugaagcuaagagaauaaagguguuauacaauaaguguaacaacauaaucaagcagaaaagaaggagugagccaguugccaucaugauacaugggccuccagguaccggaaaauccauaacaacuaguuucuuggcuagaaugauuacaaaugaaagugauguuuauucauugccuccagauccuaaauauuuugaugguuaugaucagcaaaguguuguaauaauggaugauaucaugcaaaauccagauggagaagacaugucauuguuuugucaaaugguuucaagugucacauuuauaccaccaauggcugaucucccagauaaaggcaagcccuuugauucaagauuuguuuucuguaguacgaaccauucuuuacuagcuccaccaacaauuaccucacuaucagccaugaauagaagguuuuauuuagaucuagacauuauaguucaugacaauuacaaggauggucagggaaaauuggauguuccaaagucauuuaaaccuugugauguggauagcaaaauagguaaugccaaguguugcccuuucauuugugggagagcugugucuuuuaaggaucgaaacacaugccgagaauauucccuuagccaaauuuacaaugugauaauggaagaagacaaacgccgcagaaaugugguagaugugaugucagcaauauuucagggcccaaucucaaugaacgcaccucccccaccagcaauaaccgacuuauugcagucggucagaaccccagagguuaucaaauauugugaagacaacaaauggruaaucccagcagauugcaagauugagagagaccuaaauauugcaaauaacaucauaaccauuauagcaaauaucauaaguauagcaggaaucauauuuguaauuuauaaauuauuuugcucacuacaagguccuuauucuggugaaccuaaaccaaaaacaaaagugccagaaaggaggguuguugcucagggaccagaggaggaguuugggcguucccucauuaagcauaauacaugugugguuacuacugauaauggaaaauuuacugguuugggcauauaugacagaguuaugauucuuccaacccaugcagacccgggaaaaacucuucaaauuaaugguaucaacacaagugucacugacucauaugauuuguauaauaaagauggaaucaaacuugagaucacuguuguuaaauuggacagaaacgaaaaauuuagagauauuaggaaauacauaccagaaaaagaggaugauuauccagauugcaacuuagcucuuguagcgaaucagccugaaccuacuauacuaaguguuggugauguuguaucauaugguaacauacuacuuaguggaaaucaaacugcaaggaugcuuaaauauaauuauccaacuaaaucagguuacuguggugguguucuauauaaaauagguguuguguuagguauacauguagggggaaaugguagggauggcuuuucuucuauguugcuuagaucauacuucagugaaacucagggagaaauaacaaagacagagaauguuagagaaagggaucucccaaccauacacacuccaagcaaaacaaaauugcaaccuagugcuuucuuugauguguuugaggguaccaaggaaccagcuguacuaucagacagagauccacgccuacaaacugauuuuaaaacugccuuguuuucuaaauauaaaggcaauaaaaaauuugaaaugaacgaucauauaagaguagcaguuucacacuacucagcucaguuaaugaccuuagauauugaccacaguaacauguccuuagaagauaguguuuuugguauagagggucuugaggcauuggauuuaaacacuagugcaggcuuuccauauauaagcauggguauuaaaaagagagauuugauaaauaacaguacuaaagauauaucaaaacucaaaauggcauuagauaaauaugguguggaucugcccaugguuacuuuccuaaaagaugaacuuagaaagaaagaaaaaauuucagcuggaaaaacccgugucaucgaggcuaguagcauuaaugacacaguggcuuuuagaauaguuuauggcaaguuguuugcugcuuuucacaaaaauccaggaguagugacagguucugcagucgggugugauccagaagucuuuuggucaaaaaucccuguuaugcuggauggugacuguauuauggccuuugauuauacaaauuaugauggaagcauacauccaguuugguuugaagcucuaaagaugauuuuagaaaauuugcaauuugagcccaaauuaauugacagauuguguaauucuaagcacauauacagagauucuuacuaugaaguagaaggaggaguuccaucuggaugcucuggaaccagcauauuuaauacaaugauaaacaauguaauaauaaggaccuuagugcuagaugcuuauaagcauauagauuuggacaaacucaaaauaauagcuuauggggaugaugugauuuuuucuuacaaguauguuuuggacauggaagcaauugcgcaagaggguacuaaauauggcuugacaauuacaccugcagauaaaucugagacuuuuaccaagcuugauuauaguaaugucaccuuuuuaaaaagaggcuuuaaacaggauauaaaauacccuuucuugauacacccaacuuuuccaauuaaugagauucaugaaucgauuagauggacuaagaaaccuucucaaaugcaggagcauguacucucguugugucacuuaauguggcauaauggaagggaugaauacaaagaauuugaacggaggauucgcaguguuagcgcuggacgugcgcuguacauuccuccauacgaaaugcucuugcaugagugguaugaaaaauuuuagauaauauauagaaauaacaaauauauguaguuuguuaguuuuau

SEQ ID NO: 13 - RNA, 7163 nt, Human rhinovirus
uuaaaacuggauccagguugcucccaccuggaucuccuacauggaguuguacucuauuauuccgguaauuuuguacgccaguuuuaucucccccuacccccuuacguaacuuagaaguuuuacacacaccgaccaauaggugguauuuacccaaaauaccaaaggucaagcacuucuguuaccccggucaaaauugauaugcuccaccagggcaaaaacaauugcgaucguuauccgcaaagcaacuacgcaaagccuaguaccauuuuugaugaugugugguuggucguuccacuaugaacccgauaguagaccuggcagaugaggcuagaaauuccccacuggcaacaguguucuagccugcguggcugccugcguacccccuguggguacgaagccauacauuugacaaggugugaagagccccgugugcuugcuuugaguccuccggccccugaauguggcuaaccuuaacccugcagcuaguguguacaauccaguacauagcuagucguaaugagcaauugcgggaugggaccaacuacuuuggguguccguguuucuuguuuuucuuucauauuugcuuauggugacaauauauauaacacauauauuggcaccaugggcgcucagguaucuagacagaauguuggaacacacuccacucaaaaugcuguuucaaaugguucaagccugaauuauuuuaacaucaauuauuuuaaggaugcugcuucuagcggugcuucuagauuggauuuuucacaagacccuaguaaauuuacagauccaguuaaagauguauuauugaaggauauaccaacauuacagucacccucuguugaagcuuguggauauucugacagaauuauccagaucacccguggaaauucaacuaucaccucacaggauauagccaacgcugugguugcauauggcguguggccacaguauuugaccccugaucaugcuagugcaauugacaagccaacacacccagauauauccucaaacagguuuuauacacuggaaagcaaagaauggaccagagauuccaagggauggugguggaaauuaccugaugcauuaaagaacauggggauuuuuggugagaauuuguucuaccauuucuuagguagggcaggauauacgguacaugugcaauguaaugcuaguaaauuccaccaagguacucugauaguagcagccauaccugaacaccaacuagcuuauauagauaaagggaguguuacaguuggauacaaucacacucauccaggagagacaggcagagugauuggugguuucacuaauaacaauaguagacaacccagugaugagaauuggcugaauugugauggaaccuuacuugguaacauaacaauauauccacaccaauacauuaaucuacguaguaauaauucugccacucuaauacuaccauacguaaaugcaguaccuauggauucuaugguuagacauaauaacuggagcauagugaucauacccauaucaaaaauacaguuugaaaauggagccaccccauaugucccaaucacacuauccauaagcccaauguguucagaguuuuccggugcuagaaacaacacaacacaaggauuaccuguaauguuaacuccaggcucagcacaauucuuaacuacagaugaugcucaaucaccaucagcuuuacccuacuuccauccuacaaaggaaauauuuauaccagguaaaguuaacaaucuaucagaaauaugucagguagauucuaugauaccaauuaacaacacaauagcuguuaagaauucagcugguauguauacuguucaaguuagucaacaaacucaaccagcucaagagaucuucuccaucuugguggauguggcuucgcaaccaauagcaacaacacuaauaggugagauagcuagcuauuauacacacuggacagggagucuuagauuuaguuucauguucugugggacagcuaauaccagucucaagcuacugauugcauacacaccaccuggagugccaaaaccugaaaccagacaaaaggcaaugcuuucaacucaugugguuugggaugugggucuucaauccacugucuccaugguagucccguggguaucagcaagucauuauagauacacaacaccagacaccuauucacaggcaggauauaucaccuguugguaucagacaaauuucauaguuccacccaacacaccacgagaagcagacaucauauguuuuguuucagguuguaaggacuucugucuaaggauggcuagagauaccaaccugcacacacagguagguguuauggaacaaaacccaguggaaagguacacagaagcuauuuuaaaugaaguucuuguaguuccaaauaucacaucuaguaacucccaaacaucaaaugcagcaccagcacuagaugcugcugagacaggacacacaaaccagguccagccagaagauauggucgagacacgguauguaauuacugaucagacccgugaugaaaugaguguggaaaguuuucuugguagaucugguugcauugcuaucauacauacugacuuagaucaugaagcacaacaauauaaugcacccggaaaaaauuucucucaguggaagaucacaaucaaggaaauggcucaaaucagaagaaaaugugagcucuuuacauaccucagauuugauucugagauuacaauaguagcaacaguagcugcacuaggucgggauaaugggcauguuguuuuacaguauauguauguaccaccaggggcaccaauaccaaagacuagagaugacuacacauggcaaucagggacaaaugcaucaguauuuuggcagcagggccaaccuuaccccagauuuaccauuccauuuaugaguauagcuucagcauauuauauguuuuaugaugguuaugaagaugauaagggaaguguguaugggucuguugucacaaacgauaugggcacauuguguguucguauugugacugagcagcagacacauaagguuaagauaaccaguaggauauuccacaaggcaaagcauauuagugcaugguguccaagggccccaagagcagugccuuaucaacacacuaagagcacaaacuuagugccaaggacaggugaaauuacaacucauaucagauucagaaacacugucaaagaucuaacauaccccacagaaaugacgaauguuggaccaucugaucuuuauguacacgcuggaaaucuuauauacagaaauuuacacuugugugaaccagagaauuuaaaugauucaacacugauacgcuauuccagugaucuugucauuuaccgaacaaauacaacaggugaugacaugauuccuacaugugauugcacacaagcaacuuauuacugcaaacauaaagacagauauuauccaauaaaugucagaaaacaccagugguaugagauccaagaaucagaauacuauccaaaacacauucaauacaacauccuaauaggugagggaccuugugaaccaggugacugugguggaaaacucuuguguaagcaugggguuauaggaauaguaacagcaggaggugauaaccauguugcuuuuauagauuugagggacuuccaaguugcugaagaacaaggaauaucagauuauguacacacccuuggugaagcuuuuggagcugguuuuguagauaacauuaaagaacagauucaggcaauuaauccaaucaauaagaucacaagcaaaauaaucaaauggacaauaagaauaguuucagcuauuacuauuauaauuagaaacaaugcugauccacauacuauuauagcuacucuagcuuuauuagguugcucaggcucaccauggagguuuauuaaggagaagguguguaauugguuacaacugguguauguacacaaagaaucagauggcuggauuaagaaauuuacagagauguguaaugcagcaaggggucuugaaugguuaggcaauaaaauaucaaaguuuauugauuggcuuaaaucaauguuaccucaggcaaaguuaaaaguagaauucauuaaaaacuuaaaacaguuaccacuccuggaaaagcagguugauggauuaagacuugccacacaaaaacaacaacaggauuauauagauacccugacauuaaugcuagauucaucuaacaaauuuuuaccuuuguaugcuguugaaaacaaacgcaucaaagaguugcucaaacggagucaaaugauucuucguacaucaaaaagaacagaaccaguugggguaauauuucauggagaaccuggcacugggaaauccauaaccaccucaauucuugcccgcaugcuuacaacugaaucagauauauacucucucccuccuucaccuaaauacuuugauggauaugaucagcaaaguguaguuauuauggaugacauaaugcagaaucccaguggugaagacaugucacuauucugucaaaugguaucgucaguaccauucauaccaccuauggcagauuuaccagauaaaggaaaaccauuuuccucagauuauguguuagcaagcacaaaucauacucuacuucacccaccaaccauaucauguacaacagccaugaacagaagauucuucuuggaucuggauaucauugucaaagaugauuacaagcuuggucauggaaagcucaacuuacaaugugcucuuaaacccugcaauguagggaaaauugggaaugcuaaaugcuguccucuaauuuguggaaaagcccuacaauucagagacagaaauacuggugaacacuugucccuggccacuguguacaauagaauuacucaggaaaguaagaacaggaaagaauuaacaaacucucuacaggcaauuuuccaaggacccauagauauagugaacaaaccaccaccaccagcuauaauagaccuacuugaaucaguuagaagcccagauguuauuaaauauugugaggaaaacaaauggauaauacccucagauugcaaacuugaacgugaucuaaauuaugcaaaucuaauaauauccauguuagcaaauguuauuaguauaauggguguaauauacauaauauauaaauuauuuugcucauuacaggguccguacucaggggaacccaagccaacuacaagaaaaccagagagaagaguggucacucaagggccacaagaagaauuuggacguaguuuaaucaaacauaacacuuguguuguaacaacagacaaugguaaguucacuggauuagggaucuaugacaauauaaugauuauaccaacacaugcugaugcugggaaagaaguagaaauagaugggaucaaaacucagguugaugaugcuuaugauuuacauaauucccagggaaucaaauuggaaauuacaguccuuaaauugcauagaaaugaaaaguuuagagacauuagaaaauacauaccagagacugaagaugauuauccagaaugccauuuagcacugguugcuaaucaacaggagccuacuauacuagaaguuggcgacugcugcucauauggaaacauauuauuaaguggcaaccagacagcuagaaugauuaaauacaacuacccaacaaaaucaggauucuguggaggggucuuguauaaaauaggauuagugcuagguauacauguugggggaaaugguagggaugguuuuuccgcgaugcuacuaagaucauauuucacugaacaacagggcaaaauuacaucaaaaacuaguguuaaagaguguaauuuauauaguauacauacuccaucaaauaccaaauugcaaccuaguguuuucuaugauguuuucccugguaguaaggaaccugcugucuuaucugguaaggaucccagguuagaaguugaucuagaugagucaauuuuuucaaaauauaaaggcaaugaaccaguugaaaucacccaaaacauguugacagcaacugcucauuauacagcccaauuauccacucuagacauaaaucccaaaccauugagccuagaggaaaguguauaugguauagaagguuuagaggcauuagaucuacauacuagugcagguuacccauacacagcauguggcauuaagaagaaggacuugauaccaaaagacaagaauuuaacaaagcucaagcaugcuauugaaaaauauggauuagauuuaccuaugauuaccuucuuaaaagaugagcucagaaagccagaaaaaauuaaaacugguaaaaccaggauaauugaagcaagcagucuaaaugauacagugcaauuuagaauggcauuuggcaaucuguuuucaaaauuucaccagaauccgggaaucaucacgggauccgcaguaggaugugauccagagguguuuuggucaaaaauaccaguuauguuagauggugauugccuaauggcuuuugauuauacaaauuaugaugggagucucaacccgguuugguuuaaacuacuuaguauaguauuaaaugaucuaggguuuccaggugaauuagugaauaaacuaugcaauucuaaacacauauacaaaacaacuuauuaugaaguugagggugguaugccaucaggaugugcaggaacaaguauuuuuaacacuauuauuaacaauauaauaauaagaacucuaguuuuagauacuuacaaauuuauaaauuuagauaaacuuaaaauauuagcauauggugaugauguuauuuuuucauacccuuuugaucuugacaugaaagagcuugcaaaugaagguacuaaguaugguuuguccaucacaccagcugauaaaucagacacauucaggaaacuagauuacaacaaugcuacuuuccuaaaaagggguuuuaaacaggaugaaaaguauggauuucucauucaucccaucuauccagaaacagagguuugggaauccauaagauggacgaaaaaccccagaaauaugcaagaacauguauugucccuaugucaucuuauguggcacaaugggaaagauaaauacaaacacuuuguggacaagauuaggaguguuagcgcuggacgugcacucuauauaccaccauaugaagucuugcuccacgagugguaugaaaaauuuuaaucagauauagaaauuauaaaugauuaguuuauagauuuuau

SEQ ID NO: 14 - RNA, 7134 nt, Human rhinovirus
uuaaaacuggguccagguuguucccaccuggaucuccuauugggaguuguacucuauuauuccgguaauuuuguacgccaguuuuaucuccccuuccccaauugcaacuuagaaguuuaucaauaugaccaauaggcgguaguuagccaaacuaccagaggucaagcacuucuguuuccccggucaaaguugauaugcuccaacagggcaaaaacaacugagaucguuauccgcaaagugccuacgcaaagccuaguaacaccuuugaagauuuaugguuggucguuccgcuauuucccauaguagaccuggcagaugaggcuagaaauuccccacuggcgacaguguucuagccugcguggcugccugcgcaccccuugggugcgaagccauacauuggacaaggugugaagagccccgugugcucacuuugaguccuccggccccugaauguggcuaaccuuaacccugcagcuagugcauguaauccaacauguugcuagucguaaugagcaauugcgggacgggaccaacuacuuuggguguccguguuucacuuuuuccuuuuaauauugcuuauggugacaauauauauaaacauauauauugacaccaugggcacccagguaucuagacagaauguuggaacucacuccacacaaaauucaguauccaaugguucaaguuugaacuauuuuaauauaaauuauuucaaagaugccgccuccaguggugcaucaaaauuagaguucucacaagacccuaguaaauuuacagacccaguuaaagauguacuugaaaaagguauccccacucugcaaucuccaaccguugaggcaugcgguuauucggauagaaucauacaaauuacuagaggggauucuacuauaacaucacaagauguggccaaugcuguuguugguuauggaguuuggccacauuacuuaacaccacaagaugcuacugcaauugacaaaccaucuagaccagacacuuccucaaauagguuuuacacacuagagaguaagauguggacaagugauucaaaaggcuggugguggaaauuaccugaugcccuuaaaaauauggggaucuuuggagagaauauguuuuaccauuuuuuggguaggaguggguacacagugcauguucagugcaaugcaaguaaauuucaucaagguacucugauuguuguaaugauuccagaacaucaauuggcaucugcuucaacaggaaauguuacagcuggcuacaauuuaacucauccuggugaacaagguagagauguagguauaacacgaguggaggauuuguugaagcaaccuagugaugauagcuggcuuaacuuugaugguacucuauuggggaacauaaccaucuuuccacaucaguucaucaacuuaagaaguaauaacucagcaacaauuauaguuccauaugugaaugcaguuccaauggauucaaugcccagacauaauaacuggaguuugguuauaauacccauaugccccuuagaaucugauggucagacuccagugccuauuacuauuucuaucagcccuaugugugcugaguuuucuggggcacgugcaaagagccaaggacuuccaguuauguuaacuccagguucaggucaauuuaugacuacagaugauuuucaaucuccgagugccuuaccgugguuucaccccaccaaagaaaucucaaucccagggcaagucacaaauuugauagagcuaugucagguugauacacuaauaccagugaauaacacagaaacuaaugggguuacaaauauuaacauguauacugugacaauaaauagagaaguaaauauuaccccagccaaagaaauuuuugccauuaagguugauauugcuucgcaaccucuugcaaccacuuugauuggugaaauagcuaacuauuacacacauuggacugguaguauaagauuuagcuuucuuuuuugugguacagcaaacacaacacuuaaguuacuuguagcauacacacccccuggaauuaaaaaaccugaaaauaggaaagaugcaauguuaggaacccaugucguaugggauguuggauugcaauccacaaucucaaugguugucccauggauuagugcuagucacuacagaaauaccacaccagauaaguacuccucagcagguuacauaacauguugguaccaaacaaauuugguugucccacccaacacuccuacuagugcuaagauguuguguuuugugucugguuguaaagauuuuugcuugaggauggcacgugacacuagcuuacacaagcaaagugcaccuauaacacagaauccuguagagaauuauauagaugaaguccuaaaugaagucuuaguagugccaaauaucagagagagucauggaacaacaucaaacucugcucccgcacuugaugcugcagaaacuggacacacuaguaauguacagccggaggauaugguugaaacaagguauguucagacaucacaaacacgugaugaaaugaguauugaaaguuuucugggcagaucagggugcauucacaugucaaaauuaguaguuaacuaugauaauuacaauacuggagaaaauaacauuaguacauggcaaauaaauauuaaagagauggcacaaauuaggagaaaauuugaaauguucaccuauacuagauuugauucagaaauaacuuuggugccgucaauugcagcuagagcgggugacauaggacauguuguaaugcaauauauguaugucccaccaggugcuccaauuccaaaaacuagggaagauuuugcuuggcagucaggcacuaaugcauccauuuucuggcagcauggccagacuuauccuagauuuucauuacccuuccuuaguauagcaucagcauacuacauguuuuaugaugguuaugauggugaccagacugacucacaauauggugcaguaguaacuaaugauaugggaucucuaugcuacagaauaguaacuggccagcauaagcauaagauagaagugaccacaagaauauaccauaaggcaaagcauguuaaagcuuggugccccagaccaccgagggccguugaauacacacauacacacguaaccaauuacaaaauugcaaaucaugaagucacuucugcaguugaguccagaagaacaauugucacaguugggccuagugacauguaugugcauguugggaaucucauauauagaaauuugcaccucuucaauucagaaaugcaugacucuauccuaauaucuuauucaucugacuuagucaucuaccgaacaaacaccacaggugaugacuacauaccaacaugugacugcacugaagcaacauauuauuguaaacacaaaaauagauauuuuccaauuaaagucaccagucaugauugguacgagauccaagaaagugaguauuaccccaagcauauucaauacaacuuauuaauaggugaagggccaugugaaccgggugacugugggggcaaacuuuugugcaaacauggugucaucggaaugauuacagcaggaggagauggacauguugcauucaucgaucuuagacacuuccacugugcugaagagcaaggaauaacugauuacauucauauguuaggugaagcauuuggaaguggcuuuguugauagugucaaggaacaaauaaaugcaauaaauccaaucaauaauaucaguaaaaagauuauaaaauggcuccuuagaauaauuucagcaauggucauaaucauaagaaacucaucugauccccaaacuauaauagcaacacuaacuuuaauuggcuguucaggaucaccauggagguuucuaaaagaaaaauuuuguaaguggacacaguuaaacuacauacauaaagaaucagacucauggcuuaagaaauuuacugagauguguaaugcagcuaggggguuggaguggauaggaaacaaaauuucuaaauucauugacuggaugaaaucaauguuaccacaagcacaacuuaaaguuaaguauuugagugaacuuaaaaaauugaaucuccuagaaaagcagauagaacaucuccgggcugcggauuccgcuacacaagaaaaaauuaaaugugaaauagauacacuacaugaccucucuuguaaauucuugccauuguaugcuagugaggcaaaaagaaucaaaguccuucacaacaaauguaaugugguuauuaaacaaaagaagagaugugaaccuguagcugucgucauccauggugaaccaggaacaggaaaaucaaugacaacuaauuuccuugcaagaaugauaaccaaugauagugauauuuacucauuaccuccugacccuaaauacuucgauggguaugaucagcaaaguguggucauaauggaugauaucaugcaaaaucccaguggagaugacaugacuuuauucugucaaaugguuucaaguguuacuuucauacccccaauggcugauuuaccagauaaaggaaaaccuuuugauucuagauuuguuuuguguaguacuaaucauagucuguuaacacccccuaccaucacaucauuaccugcuaugaauaggagauuuuucauggacuuagauauuauaguuugugauaaauauaaggaugcacaaggaaaacucaauguaucugcagccuuuaaacccugugauguugacacaaaaauugguaaugcacgcuguuguccauuuauauguggcaaagcaguaauguuuaaagacagaaacacuugccgaacauauaccuuggcacaaauuuacaaccaaauucuugaagaggacaaaagacguagacaggugauugaugucaugucugcaaucuuccagggaccuauuuccuuagaaggcccucccccagcugcuauuagugaucuccuucaaucaguuaggacuccugaaguuaucaaauauugugaggccaacaaauggauaauccccgcugaguguaaaguagaaagagauuugaauauagcuaacacaauuauaacaauuauagcaaacauuaucaguauaucaggaauaaucuauguuauuuacaaacucuuuugcacauuacaaggaccuuacucaggagaacccaagcccaaaacuaaaaugccagaaagaaggguuguagcucaagggccagaggaagaguuugguagaucacuuauaaaacacaacucauguguagugacaacacaaaauggcaaauucacggguuuggguaucuaugacagaacauugauuaucccaacucaugcugauccagggaaggaaguccaaauugaugguauugccacaaaaguagaagacucauaugaucuauuuaacaaagaugguguaaaauuagaaauuacuguauugaaauuaaagagaaaugaaaaguuuaaggacauuaggaaauauauaccagaaaacgaggaugauuacccagauuguaauuuagcuuuaucugcaaaccaaccagaaacuacaauaaucaauguaggggaugucauaucauaugguaauauuuuacuuaguggaacucagacagcuagaaugcuuaaguauaacuayccaacaaaaucaggguauugugguggaaucuuauacaaaauugggcaaguucuagggauacaugugggugguaauggaagagauggauuugcugccauguuguuaagaucuuacuucucugagacacaaggucaaauaaucaauucaaaacccacggauaaauguggcuuaccaaguauccauacaccaaguaaaaccaagcuacaaccuagugucuuuuaugacauauucccaggcaacaaggaaccagcuguucuuucaaauaaggacccuagauuagaaguugauuuugaaaaagcucuuuucucuaaauauaaagggaaugaacacuguguuaugaaugaucauauuaauguagcuaucucucauuacucagcacaauuagcuaccuuagauaucaacccacaaccuaucucuauagaagaaagugucuucggcauggaugguuuggaagcacuugauuugaacacuagcgcagguuuuccuuaugucaccauggguauuaagaaaagggauuugauuaacaagcaaaccaaggauauaacuaaacucaaaauggcacuagauaaauaugguguugaucuacccaugguuacuuuucuuaaggaugaacucagaaagaaggaaaaaauuucugcuggaaagacccguguuaucgaggcuagcaguguaaaugauacuguuuuguucagaacaacauuuggcaaucuuuucuccaaauuucaccuaaacccaggcauaguuacaggcucugcuguagggugugauccugaaguauuuuggucaaaaauaccagugaugcuagauggggauugcauaauggcauuugauuacacaaauuaugaugguaguauacacccaaucugguuccaagcauuaaagcaaguccugacuaauuuaucuuuugaagccaguuuaauagacagauugugcaaaucaaaacauauuuuuaagaacauauacuaugaaguugaagggggugugccaucaggguguucugggacuaguauuuuuaauacaaugauuaacaauguuauaauuagaacauugguuuuagaugcuuacaagaacauagauuuagauaaauuaaaaauaauagccuauggugaugauguaaucuucuccuacaaauaccaacuugauauggaggcaauugcaaaugaagguacuaaauauggauuaacaauaacgccugcagacaaauccacauguuuuaaacaacuugacuacaguaaugugacauucuuaaagagaggguucaagcaggaugagaagcaucaauuccuaauacauccaacauuuccaauugaggagauacaugaauccauucgauggacuaaaaauccaucucagaugcaggagcauguucugucacugugccaucuaauguggcauaaugguagagauguguacaagcaguuugagaagcggauacgcaguguuggcgcuggucgcgcacuguauauuccuccuuaugaucugcuucugcaugaaugguaugaaaaauuuuaaauuguuuagauauagaaauauuaaacaguuaguuuuuuaguuuuau

SEQ ID NO: 15 - RNA, 7129 nt, Human rhinovirus
uuaaaacuggaucuggguuguucccacccagaucacccaagugguguagugcucuguuauuucgguaaccuugcacgccaguuuuaucaccccuuccccacguaacuuagaagcuuuuaaacacagaccaauagggagcgacaaaccagucgugaaaggucaagcacuucuguyuccccggucaauguugauaugcuccuccagggcaaaaacaacagcgaucguuacccgcaagaugccuacgcaaagcuuaguaauaucuucgaagauacuugguuggucgcucaugugcaaccccagcauuagaccuggcagaugaggcuagaaauuccccacuggcgacaguguucuagccugcguggcugccugcacacccuaacgggugugaagcccaguauuggacaaggugugaagagccccgugugcucaucuugaguccuccggccccugaaugcggcuaaccuuaarccugcagccauugcucacaauccagugagucuauggucguaaugagcaauugcrggaugggaccgacuacuuuggguguccguguuucucuuuuuuccuuauauuugagcuuauggugacaauauauagugauauauauuggcaucaugggcgcucagguaucuagacagaauguugguacacacucaacccaaaacacuguaucaaaugguucuaguuuaaauuucuucaacaucaacuacuuuaaggacgcagccucuaguggggcgucuaaauuagaguuuucacaagauccaagcaaauuuacagauccuguuaaagauguucuggaaaaagguauacccacuuuacaaucaccaaccguugaagcuuguggauacucugacaggauuauucaaauuacaagaggagacucuaccauaacaucacaagauguugcaaacgcaguuguuggguacggaguuuggccucauuauuuaacuccugaggaugcaacagcaauagacaaaccaacucaaccugacacaucuucyaacagauuuuacacauuagaaagcaaaauaugggcaucuaauucaaaggguuggugguggaaauuaccagaugcccuuaaagacauggguauauuuggucaaaacauguauuaucauuucuugggcagaaguggauauacaauucauguucagugcaaugcaagcaaauuucaccaggggacuuuaauaguggcugccauaccagaacaccaauuggcuagugcgggcagaggcaauguggcugcuggauauaauuacacacacccuggugagauugguagggauguuggcaaggaaaaucgggaacaagcaaacaaccaaccuagugaugacaauuggcuuaauuuugauggaacacuuuugggaaauauaaccauauucccccaucaauucauuaauuugagaagcaacaauucugcaaccuuaauacuuccauauguuaaugcugugcccauggauuccaugcucagacauaauaacuggagcuuaguuauaaucccaauaugucccuuagaggcuagcggugcugauguaacagugcccauaacaauauccaucagucccauguuugcugaguucucuggagcucgugcaagaagccagggguugcccguucuacugacaccuggaucuggucaauuuuuaacaacagaugacuaccaauccccuagcgcacuaccuugguuccaccccacaaaggaaauauuuauaccaggucaaguucggaaccuaucagaguuaugucaaguugacacuauuaucccaaucaaccacacaacgucaacuaccucuagugugaacauguacacaauucaauuaacaaaacagcaaccagggacugaaguuuuugcuaugagaguugauguugcaucacaaccuuuggcaacuacauuaauaggggaaaucuccagcuacuuuacaaacuggacugguagccuacguuucagucuuauguuuuguggcucugcaggaacaacgcuuaagauguuaguugcuuacacuccuccaggaauagcaaagccagaaaccagaaaggaugcaauguuaggcacucaugucgugugggaugucggucugcaguccacuauaucaaugauagugccuuggauuagugcuwgucacuuuagaaacaccacaccagacacuuucucacaagcaggauacauaacaugcugguaucaaacuucccuuguaacacccccuagcacaccugaaacagcuagaauguuaugcuuugugucgggaugcaaagacuuuugcuuacguauggcuagggauacaaacuugcacaagcaaauaggggccaucacccaaaacccuguagagaaauacauugaugguguauugaaugaaguauugguuguuccaaacacaaaugaaaguyamcccaguacaucaaaugcugcaccagcacuagaugcugcugaaacuggacacacaagcaaugugcagccagaagacaugauagaaacacgcuauguguuaaauucacaaacuagagaugaaaugaguauugagagcuuccugggaagaucugguugcauacauauaucacacuuagaaguaaaauacacaggguauaaugaagaggguaauaacuuuaacauauggcaaauuaaccuuaaagagauggcucagauaagaaggaaguuugagcuauuuacauaucucagguuugauucugaaaucacuuugguaccaugcauugcuucacaaaguaaaaacauuggucauguggucaugcaauacauguauguuccgccuggagcuccuaaaccugaaaagagagaugacuacacauggcaaucuggcacuaaugcaucuguuuucuggcagcauggucaaccuuauccccgauucucacucccuuuccucaguguagcuucagcauauuacruguuuuaugauggguaugauggaggucccggaucacguuauggagcagugguaacaaaugauaugggcacacugugcucuaggauugugacugaagaacaccagacacaagucaaaauuacaacuagaguguaccacaaagcaaaacauguaaaggcauggugcccacguccuccaagagcuguuggauauacacacacacaugugacaaacuacaaaccaucuguaggggauuacacacuaccuaucccaacaagagccaacccuagacaaauuuugaauguagggccaagugacauguacgugcauguuggcaaucuaauuuauagaaaucuacaccucuuuaauucugauauucaugauucugugcuagucuccuauucuucagauuuagucaucuaccgaacaaacacuacaggugaugauuacauuccaacaugugacuguacugaugcaaccuacuauugcaaacacaaaaauagguacuacccaauuaaaguaacaagucaugauugguaugaaauucaagagagugaguacuauccaaaacauauccaauacaauuuguugauuggugagggacccugugaaccuggagacuguggugguaaauuacuguguaaacauggaguaauagguaucauuacagcugguggugagggacauguggcauucauagauuuaagacauuuucacugugcagaggagcagggcauuacagacuacauucauauguuaggggaagccuuugguaauggauuuguugacaguguuagggagcaaguuaaugcaaucaacccaaucaauaauaucagcaagaaauugguuaagugguuacuuagaauaguuucugcuaugguaauaauaauaaggaacaguucagauccacaaacaguuauagccacgcucacauuaauuggguguucggggucuccuuggcguuuucuuaaagaaaaauucuguaaauggacccagcuuaauuaugugcauaaagaaucagauucauggcuaaaaaaauuuacugaaaugugcaaugcugcaaggggucuugaauggauugggaauaaaauaucuaaauuuauagacuggaugaaaucuaugcugccacaggcccagcucaagguuaaguaucucagugaauuaaagaaauuaaauuuacuagagaaacaaauugaaaaucugcgaggugcggauucaaaaacucaggaaaagauuaaauuagaaauagauacucuccaugauuuaucauguaaauuucuuccucuuuacgcuagugaagcaaagagaauuaagguuuuayauaacaaguguaacaauguaaucaaacagaagaaaaggagugaaccaguugccgugaugauacauggcccaccaggcacuggaaaaucuauaaccacuaguuuuuuggcuagaauguuaacaaaugagagugauauauauucacuucccccggauccuaaguauuuugauggauaugaucaacagaguguuguuauaauggaugacaucaugcaaaauccagauggggaggauauguccuuguuuugccaaauggucucaaguguuaccuuuauuccuccaauggcugaucuaccagacaagggcaaaccuuuugacucuagauuugucuuuugcaguacuaaucacucacuuuuagcucccccaacuauuacuucauugucugcaaugaauagaagauuuuucuuggacuuggauauuguuguacauraaaakuacaaagacaacuuagggaaauuggacgugccaaaaucuuucagaccaugugacguggauaacaagauuggcaacgcuaaguguuguccauuuauaugcggcaaagccguaucauuuaaagauagaaauacuugccaagaauacucacucagucrgaucuacaauaugaucauagaggaagauaaacgccgcagraaugugguggaugucaugacagcaauauuccaaggcccaauuucaauggaugyaccaccuccuccagccauugmugaucucuuacaaucaguucgaacaccagaagugauuaaauauugugaggraaauaaguggauaaucccagcagaauguaaaauugaaagagauuuaaauuuagcaaauaacauaauaacuauuauagcaaaugugauuaguauagcaggcauuauauuugugaucuacaaauuauuuuguacucuucaagguccauauucuggugaacccaaacccaaaacuaaaauuccugaaagaaggguuguugcccaagguccagaagaggaguuugggcgcucuuuaauaaaacacaacacauguguggucaccacagacaauggaaaguuuacaggcuuagguaucuaugacagggucaugauacuaccaacacaugcugauccuggaaagauaauucaagugaauggaauuaauacuacuguuugugacucuuaugauuuguauaacaaaaauggaaucaaauuagaaauaacuguugucaaauuggauagaaaugaaaaauucagagauauacggaaguauauaccagagagagaagacgauuacccagacuguaaccuggcuuugguugcaaaccaaccugaaccaaccauaauaaaugugggugauguuguauccuauggaaacauacuucuuaguggagaccaaacagccagaaugcucaaguauaacuaccccacuaaaucaggauauuguggaggaguuuuauacaaaauugguaacaucuuagguauacaugugggugguaauggaaaagaugguuuuucugcuacacuacuuagauccuauuucagugaaacacagggacaaauuacaaagacaacaagugucagggaguguggucuaccaacuauacacacaccaaguaaaacuaaguuacaacccagugucuuuuaugaaguguuugagggcacuaaagaaccagcaguguuaacagauaaagacccacguuuggaaacugacuuuaaaacagcucuguuuucuaaauacaaagguaaucugccaugugaaaugaaugaccaugugaaaguugcuguugcacacuacucagcucaauuaaugacacuagaaauugauucaagaaacaugagcuuggaagauaguguuuuuggaacugaaggucuugaagcgcuugauuuaaacacuagcgcaggauuucccuauauuaguauggguauuaaaaagagagaucuaauaaauaacagcacaaaagacauaucuaaacuuaaauuggcuuuggauaaauauggaguagacuuacccauggucacuuuccucaaagaugaacugagaaagaaggaaaagauugcagcuggaaaaacucgagucauugaagcuaguagugugaaugauacaguggcuuucagaauggucuaugguaaccuauucucagcuuuccacaaaaauccugggauuguuacagguucugcaguggggugcgauccugaaacuuucuggucaaaaauuccuguaaugcuagauggugauugcauaauggccuuugauuauacaaauuaugaugguaguauucauccaaugugguuugaagcacucaaaaugauuuuacauaaucuugaauuugaacccaaauugauugauagacuuugcaacucuaaacacauuuauagagacucauacuaugaaguagaaggagguguuccaucuggaugcucgggcacuagcauuuuuaacacaaugauaaauaaugugaucauaagaacuuuaguuuuagaugcauauaagcacauagacuuagacaagcucaaaauuauagcauauggggaugaugugaucuuuucauacaaguacgcacuygauauggaggcgauugcaucggaggguacaaaauaugguuuaaccauaacaccagcagauaaaucugaaaccuuuaaggaacuuaauuaugauacugucacauuucuuaaaagaggcuuuaaacaggauauaaaauacccauuuuuaguccacccaacauuuccuguaaaagaaauucaugagucaaucagguggacaaagaaaccaucucaaaugcaggaacauguacucucauugugucacuuaauguggcauaaugguagagauguuuacagcgaguuugaacggaagauacgcagugucagcgcaggucgcgcacuguacaucccgccuuaugagcuguuacugcaugagugguaugaaaaauuuuaauuaucagauauagaaauaacaaauaauuaguuuguuaguuuuau

SEQ ID NO: 16 - RNA, 7132 nt, Human rhinovirus
uuaaaacuggaucuagguuguucccaccuagaucuccuacauggaguuguacucuauuauuccgguaauuuuguacgccaguuuuauccuccccuccccuuaaaguaacuuagaaguuggacauaucgaccaauagguaacauuuauccaaaauguuaaaggucaagcacuucuguuuccccggucaagguugaugugcucuaacagggcaaaaacagcugcgaucguuauccgcaaagcaacuacgcaaagccuaguagcauuuuuugagaguaugugguuggucgcuccacuauaaacccaauaguagaccuggcagaugaggcuagaaauuccccacugguaacaguguucuagccugcguggcugccugcgugcuccuugugagcacgaagccauauauuugacaaggugugaagagccccgugugcuugcuuugaguccuccggccccugaauguggcuaaccuuaacccugcagcuagcguguacaauccaguacaaagcuagucguaaugagcaauugcgggaugggaccaacuacuuuggguguccguguuuccuguuuuucuuuuauauuugcuuauggugacaauauauauauaacauauauauuggcaucaugggcgcucagguauccagacagaauguuggcacacacuccacacagaauucaguuuccaauggaucaaguuuaaauuacuuuaauauaaacuacuucaaggaugcugccucuaguggugcuucaaaacuugaguuuucacaggauccaaguaaauuuacagacccuguuaaggauguguuagagaaggguauccccacauuacaauccccaacaguugaggcauguggauauucagacaggaucaugcaaauaacacgaggagauuccacaaucacaucacaggauguugcuaacgcugugguugccuaugguguguggccucacuacuuaacaccucaagaugccacugcuauugacaaaccaucgcgcccagacaccucuuccaacagauuuuacaccuuagagagcaaaacauggacagggacguccaagggauggugguggaaauuaccagaugcacucaaggaaaugggaaucuuuggugaaaacauguuuuaccauuuccuugguagaaguggguauacagugcauguucagugcaaugcaaguaaauuccaccaaggcacucuuaucguggcuaugauaccagaacaucaguuggcaagugcaacaacaggaaauguuagagcuggauacaauuuaacacauccuggugaaaguggcaggaauguugacccaauaacuagggauaauccaacaaagcaaccuagugaugauagcuggcuuaauuuugauggaacacuauuaggaaauauaacaauauucccacaccaguuuauuaauuugaggagcaacaauucugcuacaauuauugugccauauguaaaugcagucccaauggauucuaugcucagacauaacaauuggaguuuagugauaauaccaauuuguccacuugaaaacucaacugaagugccuaaugcaguaccaauuaccauaucuauaagucccaugugugccgaguuuucuggcgcgcgugcaagaagucaaggauuaccaguuaugauuacaccuggcucuggccaauuuuugaccacagaugacuuucaaucacccagugcucuaccuugguuucacccuacuaaagagauaucuauaccaggacaagucagaaaucuuguugaauugugucaaguggacacacucauuccaauugacaguguggaagcuaacauuaaaagcacaaauauguauacugucacuuugacuagagaaacggacucagccaaagagaucuuugccauuaaaguugacauugcaucacacccacuugcaaccacauugauuggugagauagcuagcuauuacacccauuggacaggcagucuucguuuuagcuuucucuuuugcgguacagcguguacuacuuuaaaacuguuaauagccuauacacccccugguauuagaaaaccugagaacaggagagaagcaauguuagguacgcauguuguaugggaugugggcuuacaauccacuauuucaaugguuguuccuuggguuagcgcuagccacuuuagaaauacuaccccagacaaauauucccuggcaggauacauaacauguugguaucaaacuaaucuuguaguuccaccaaauacaccaacaacagcaaaaaugcuguguuuuguuucaggcuguaaagauuucuguuuaagaauggcacgagacaccaauuuacacuuacaaagugcuccuauuacacaaaacccaguagaaaauuauauagaugagguuuugaaugaaguacugguugugccuaauauuaaggaaaguaaaccaucaacaucaaacucagcaccagcuuuggaugcagcagaaacuggacauacgaguagcgugcagccagaagauaugguugaaacuagauauguccaaacaucacaaacauuagaugagaugaguguugaaaguuucuuggguagaucagguugcauacacauguccaaguugacuguggauuaugacaauuaugauacaaaaaauuuuuucaaauggcaaauaaaucuacaagaaauggcccaagucagaagaaaauuugaauuauucacauauacuagauuugacucugagauuacaauaguuccauccauagcuggcaagggagaugacauuggacauguuguaaugcaguacauguauauaccaccuggagcaccagucccaacaaagagagaugauuauacauggcaaucaggaacaaaugcaucugucuuuuggcaacauggacaaaccuauccuagauuuucccuuccuuuucugaguguagccucugcauauuacauguuuuaugauggauaugauggugaucaacacgacucaguguaugguucaguuguuacaaacgacaugggaacucuaugcuauagaauagucacugacaagcauaaucaccaaauagaaauuacaacaagaauauaccacaaagcaaagcacauuaaggucugguguccaaggccacccagagcuguugaguauacacauacucacgugaccaauuauaagcaucagacucgugaagucaagacagcaauugaaccuagaagaggaauuaaaacaguugguccuagugacauguauguacauguugguaaucucauauacagaaaccuacaucucuucaauucagagaugcaugauuccauucugauuucuuauucaucugacuuagucauauaccgaacaaacacaauaggugaugacuauauaccaacaugcgauugcacugaggcaacuuauuacuguaaacacaaaaacagauacuacccaauuaagguaacuagucaugauugguaugagauacaagaaagugaguacuaccccaaacauauucaauauaacuuauuaauaggugagggaccaugugaaccaggugauugugguggcaaauuguuaugcaaacauggaguuauaggaauaguuacugcugguggugaaggucauguagcuuucauugaucuuagacacuuucacugugcugaugaacaggggauaacugauuauauccauaugcuaggggaagcuuuuggcaauggguuuguagacaguguuaaggaucagauaaaugcaauaaauccaaucaacaguauaaguaagaaaauaauuaaaugguuacuuagaauaauaucagcaaugguuauuaucauaagaaacucgucagacccccagacuauaguagcaacacuuacuuuaauaggauguucuggcuccccauggagauuccuuaaagaaaaauuuuguaaauggacacaacuaaacuacauucacaaggaaucugauuccuggcuuaagaaauucacugagaugugcaaugcagcucgugguuuagaauggauugguaauaaaauaucaaaauucauugaauggaugaaauccaugcuaccacaggcccagcuuaaaauaaaauaccucagugaacuuaaaaaacucaaucuccuagaaaaacagauagaacaucuuagaauugcagauucaaguacccaagaaaagaucaagugugagauugacacucuacaugauuuaucauguaaauuucucccgcuauaugcuagugaagccaagagaauaaaaauuuuauauaauaaauguaaugugauuauuaaacaaaagaagagaugugaaccaguugcaguuguaauucauggugagccugguacaggaaaaucaaugacuacuaacuuccuagcaaggaugauaacaaaugacagugauauuuauucacucccaccagacccuaaauauuuugauggauaugaucagcaaaguguaguuaucauggaugacauuaugcaaaauccaaguggugaagacaugacacuuuucugucaaaugguuucaaguguuacuuucauuccucccauggcugacuuaccugauaaagguaagccauuugauuccagauuuguuuuauguaguacuaaucauggcauguuagcaccaccaacaauuacaucacuaccagcaaugaauagaagauucuuccuagauuuagauauuguaguaaauggcaaauauaaagacucucaggguaagcuaaauguaucugcugcuuuucgaccuugugauguugaugcaaaaauuggcaaugcucgauguuguccauuuaucuguggcaaagcuguuauguuuaaggauagaaacacaugcacaucauacacucuaucacagguauauaauaauauacuugaugaggauaaaagaaggaggcaaguuguagauguuaugucugcaaucuuccaagggccaauaacccuugaagggccuccaccagcugccauaaaugaccuucuaaaaucaguuagaacuccugaaguaauuaaauauugugaauauaacaaguggacaguuccugcugaauguaaaauagagagagacuuaaauguagcuaacacaaucauuacaauuauggcaaauauuauaagcauugcugguauaauuuauguaauauacaagcuguucugcaccuuacaagggccauauucaggugaaccuaucaagaaaacuaaagucccagaaagaagaguuguugcucaaggcccagaagaagaauuugggcgaucacuuauaaagcacaacucaugcauuguaacuacacaaaaugguaaauuuacuggucuagguauauaugacagaguccuuauuaucccaacucaugcugacccugguagagaaguacaaauugauggcauuaauacuacaguggaggauucuuaugaucuauacaacaaggauggaaucaaacuagagauuacaguacuuaaauugaaaagaaaugagaaauuuaaagauauuaggaaauaucuaccagaaaaugaagaugacuacccagauuguagucuagccuugucagccaaucaaccugaaaccacuauaauuaaugugggugaugucauaucauaugguaauaucuuacuuaguggaaaccaaacugccagaaugcucaaguauaacuaucccacuaaaucaggguauuguggugguauuuuauacaagauuggccagguuuuagguauucauguuggggguaauggaagagaugguuuugcggccauguuauuaagaucuuauuuuucugaaacacaaggacaaauaguuacuagaaaaucuacucuugauugcaaccuuccuaguauacauacuccaaguaaaacaaaauugcaaccuagugucuuuuaugauguuuuuccaggcaauaaggagccagcuguucucucugaacaugaccccagauuagaagucaauuucaaagaagccuuauuuucaaaauacaaaggaaauagccagugugaauugaaugaucacaucaagguagcaauuucacauuacucagcacaauugacaacacuagacauauguccagaucccauuucuuuggaagacaguguuuuugguguagaagguuuagaagcacuugaccuuaacacuagugcaggauuuccauaugugacuaugggaauaaagaagagagauuuaauaaauaaacaaaccagggacauuacuaaauugaaaauggcaauggacaaguaugguguugauuuaccuaugguaaccuuucuuaaggaugagcuuaggaagagagagaaaaucucugcugggaaaacuaggguuauagaagcuaguagugugaaugauacuguuuuauucaggacaaccuuuggaaaccuauucucaaaauuucacuuaaacccaggaauuguaacaggaucagcuguugggugugacccagaaacauuuuggucaaagauaccuguaauguuggauggagaauguaucauggcauuugauuauacaaauuaugaugguaguauucacccaauuugguuucaagcucugaaagaaguuuuaucuaaucuuggauucgaaucuagucugauagauagauugugcaaaucaaaacauauuuucaaaaacauguauuaugagguugagggugggguuccaucaggauguucuggcacaaguauauucaauacaaugauuaauaacauuauuauuaggacauuaguuuuggaugcauacaagaauauugauuuagacaaacucaaaauaauagcauauggagaugauguuauuuucucuuauaaauaucaacuugacauggaagcaauugccaaagaaggaacaaaguaugguuugacaauaaccccugcugacaaaucaugugaauuuaaacaacuggauuauagcaaugugacuuucuuaaaaagaggauuuagacaagaugaaaaacaucacuucuuaauacacccaacuuuuccaguagaggaaauacaagaguccauaagauggacuaaaaaaccaucucaaaugcaggagcauguucuaucauugugucauuuaauguggcauaaugguagagauauauacaagcaguuugagcagaagauacgcaguguuagcgcuggccgugcacuguaugucccuccuuaugacuugcuccuucaugagugguaugaaaaauuuuaaauuguuuagauauagaaguaauaaacaauuaguuuuuuaguuuuau

SEQ ID NO: 17 - RNA, 7126 nt, Human rhinovirus
uuaaaacuggauccagguuguucccaccuggaucuccuacauggaguuguacucuauuauuccgguaaucuuguacgccaguuuuauacccccuaaccccuuguaacuuagaaguuaagcacauagaccaauaggcgguggccacccaggucgcuaacggucaagcacuucuguuuucccgguuaagauugauacgcuccaacagggcgaaaacagucugaaucguuaaccgcaaagugacuacgcaaagyuuaguaaugccuugaagaauuuaugacuggucguuccgcuauaaccccuaguagaccuggcagaugaggcuagaaauaccccacugguaacaguguucuagccugcguggcugccugcacacccuuucgggugugaagccauauauuugacaaggugugaagagccccgugugcucacuuugaguccuccggccccugaauguggcuaaccuuaacccugcagcuaguguauguaauccaacauauggcuagucguaaugagcaauugcgggaugggaccaacuacuuuggguguccguguuucacuuuuuccuuuuauuuugcuuauggugacaauauauauauuauauauauuggcaucaugggcgcacaaguaucuagacagaauguuggaacccacuccacucagaacucaguuucaaaugggucaaguuugaauuauuuuaacauaaauuauuuuaaggaugcugcauccaguggagccucaaaacuugaauuuucacaagaccccagcaaauuuaccgauccagucaaagaugucuuggagaaaggaauuccaacacuacaauccccaacuguagaggcaugugguuauucagauagaauaaugcagauuacaagaggugauucuacaauaacaucacaagauguagccaaugcaguuauagguuauggaaucuggccacauuaccugagugccgaagaugcuacugcuauugacaaacccacacaaccagacacuucaucuaauagguuuuauacuuuagagaguaaaacauggcaugcugauucuaagggauggugguggaaguuaccagaugcacuuaaagauauggguauauuuggagagaauauguacuaccacuaucuugguagaaguggauauacagugcacguucaguguaaugcuaguaaguuccaccaagggacauuacugguuguaaugauaccagaacaccaauuggcaaaugcagauucuacuaaggugggagcuggguauaauuauacacauccuggugaacgaggaagacagguuggugacgcacgugauccuaucaccgcagugcacccaagugaugauaauuggcuuaauuuugaugguacuaugcuugguaauguucuuauauuuccacaccaauuuauuaaucuuaggagcaacaacucugcaacaauaauaguuccuuauguaaaugcuguuccaauggauucaaugcucagacacaacaauuggaguuuagugauaauaccaguuaguaagcugcaagcugauaauacuaguguuguaguuccaaucacuauaucaauaaguccaauguuugcugaguucucuggagcgcgagcaaggccuacaagagcugcuucacaaggcuuaccaacauuuauaacaccagguucaggacaauuuaugacaacugaugauuuccaaucaccuucagccuuaccaugguaucauccaacuaaggaaaucuuaauuccaggagaagucaaaaaucuaauagagaugugccaaguugacacacuuauccccauuaacaacacaaauaacaauuuaagaaagguaaacuuauauaccguggagcuaaccaaucaaccaaugccagcucaaaagauuuuuucuauuaaaguggauauugccucacaaccuuuaguaaacacuaugcuuggccaaauugccagcuauuucacacacuggacugguagcuugcgcuuuaguuuuauguuuuguggcacggcaaacacaacccuuaaacugcuuuuagcauacacaccaccgggcauuggagagccacaagauagaaaacaagcuaugcuugguacacacauagucugggaugucggguuacaaucaacaguaucuuuaguaguuccauggguuaguucuagucacuuuagauacaccucuagagaugaacauucagcagcuggauauauaacauguugguaccaaacaagucuuguuuuucccccuaauacccccagcacagcugauauguuaugcuuugugucagcuuguaaagacuuuuguuugcgcauggcuagggacacagacaugcauguucagagugaagcuauugaacaaaauccaauugaaaauuauguagaucaaguacuuaaugagguucuagucguaccaaauauuaaagaaagucacccaagcacaucaaauucugccccaauucuagaugcugcugaaacuggacauacuagcaaugugcaaccagaggauaccauugaaacucguuauguucaaaccacacaaacuagagaugaaaugaguauugaaaguuuucuugguaggucaggguguguacauacuucaacaauugaaacaaaacuuaaacaugaugaaagauuuaaaacauggaauaucaauuuacaagaaauggcucaaauuaggagaaaguuugagauguuuacauaugugagauuugauucagagauaacccuaguuccaucuauugcaggacguggugcagauauaggucacauaguuaugcaauauauguaugugccaccuggagccccauugccaacagacagaaaacacuuugcauggcaaucaaguacuaaugcaucaauauuuuggcaacauggacaacccuucccuagauuuucauugccauuucugaguguugcaucugcuuauuacauguuuuaugauggcuauaauggugaugaucacacagcgagauaugguaccacugugguuaaccguaugggagcacugugcaugagaauugucacaaauaaacaaguccaugauguugagguuacaacuaacauuuaccauaaagcuaagcauguaaaagcauggugcccuagaccaccuagagcugucccauauaaauauguugacuucaauaauuaugcagccagugauaauguugacaucuuuauacaaccaagaaacaguuuaaaaacagcuggaccaagugacauguauguccauguuggcaauuugauauacagaaaucuccaucuuuucaauucagaaaugcaugauucaauccuagugucacauuccucagaucuagucauuuaccgaacaaacacaacagguaaugacuauauuccuacuugugauugcacugaugcuacguauuacuguaaacauaaggauagauauuaucccauuaaagucacuagucaugauugguaugaaauacaagagagugaguauuacccuaaacauauccaguauaaucuuuugauuggugaggggccaugugaaccaggugauugcgguggaaaacuacuaugcaaacauggaguaauugggauaguaacugcagguggagagggacauguggcuuuuauugaucuuagacaguuucacugugcagaugaacaaggagugacugauuauauccauauguuaggugaagcuuuuggugcagguuuuguugacaguguuaaagagcaaauaaaugcuauuaauccaauuaauaacauuagcaagaaaauaauuaaauggcuucuuagaauaauuucugcaaugguuauaauuauuagaaauucuucugauccacaaacaauuauagccacauuaacucugauuggauguucagguuccccuuggagauuucucaaggaaaaauuuuguaaauggacccaauuaaauuacauacauaaagaaucugauucauggcuuaagaaauuuacugagaugugcaaugcagccaggggauuggaauggauuggaaauaaaauaucaaaauuuauugaauggaugaaaucuaugcuuccucaagcucaacuuaagguuaaguauuugagugagcuuaaaaaauuaaacuuucuugagaagcagauggaacaccuuagaguugcugacucucaaacucaggaaaaaauuaagcaugagauugacacuuuacaugaucuuucuuguaaauuucucccacuuuaugcuagugaagcaaagagaauuaagauauugcauaauaaguguaguacaauaaucaaacagagaaaaagaugugaaccaguugcaguugucauacauggggaaccuggcacuggcaaauccaugaccacaaauuuccuugcuagaaugauaacaaaugauagugacauauacucuuugccaccugaucccaaguauuuugauggauaugaucagcaaagugugguuauuauggaugauaucaugcagaauccaaguggugaggauaugaccuuauuuugucaaauggugucuaguguuacauucauacccccaauggcugacuuaccugauaaagguaagccuuuugauucaagauuuguguuauguaguaccaaucauaauauguuagcaccaccuacaauuaccucauuaccugcuaugaauagaagauucuuuuuugaccuagauauuguagugugugacaaguacaaagacccacaagggaaacucaaugugucagcugccuuucgaccaugugauauugacacaaaaauugggaaugcccguugcugucccuucauuugugguaaagcugucguuuucagagaucgcaauacuugccaaacuuauaccuuggcacagguguauaaccaaauacuuguugaagacaaaaggcgcaggcaaguuauugaugugauggcagcaauuuuccaaggcccuauuacuauugaaggaccaccaccugcagcaauaaaugauuuguuaaaaucaguuagaacuccagaaguaauuagauauugugaagagaauaaauggauagugccagcugaguguaaaauugaaagagaccuuaauauagcaaauacaauuauuacaaucauagccaauauuauuaguauaucugggauaauuuauguaauuuacaaacuuuucuguacauugcaaggaccauacucaggugagccuaaaccaaaaacuaaaauaccagagaggagaguuguggcucaggguccagaagaagaauuuggcagaucacuuauuaaacacaauucaugugugguaucaacacagaaugguaaauuuacagguuuagggauuuaugauagaacauuaaucuuaccaacacaugcagauccugguaaugagauacagauugauggaauugcaacuaaaguagaagauuccuaugacuuauauaauaaagauggaguaaaguuagaaauuacagucuugaaacuuaagagaaaugagaaguucaaagauauuaggaaauauauaccagaaaaugaagaugacuacccagauuguaauuuggccuuaucugcuaaucaaccagaaacgacuauaauuaauguaggagauguaguaucuuaugguaauaucuuacuuaguggaaaccaaacagcuagaaugcuuaaauacaauuacccaacaaaaucagguuauuguggugguauucuguauaaaauuggucaaguccuuggaauccauguuggaggaaacgggagggauggauucgcugccaugcuguuacgaucuuacuuuucugaaacacagggucaaauaaucaccuccaaaucuacaagugagugugguuugccuaguauucacacaccaaauaaaacaaaauugcaaccuaguguuuuuuaugauguguuuccugguaguaaagaaccagcuguccucacaaguaaugauccuagauuagagguagacuuuaaagaggcuuuguuuucuaaauauaaaggaaauaaucagugcacuaugaaugaucauauuaaaguagccauuucucacuauucagcacaacugaugacacuagauauugaucccaaaccuauauccuuagaagagaguguuuuugguauagaaggccuggaggcauuagaucuuaacacuagugcaggauuuccuuauguaucuauggguauuaagaaaagagauuuaauuaauaaacaaaccaaagaccugacaaaacuaaagguagcauuggacaaguaugguguugauuuacccaugguaacuuuccuuaaggaugagcuuagaaagaaggagaagauccgugcuggaaagacccguguaauugaagcuagcaguguaaaugauacuauauuguuuagaacaacuuuuggcaaccuuuucucaaaauuucacuuaaacccagguauuaucacugguucugcugugggaugugacccagaaacauuuuggucaaaaauaccagucauguuggauggagaguguauaauggccuuugacuacacaaauuaugauggaaguauacauccuauuugguuucaagccuugaaagaaguguuaaucaacuuaucauuugagccaaccuuaauagacagguuguguagauccaaacauaucuucaaaaacacauauuaugagguugagggugggguuccaucagguuguucugguacuagcauauuuaauaccaugauuaauaauauaauuauaagaaccuuagugcuagaugcuuacaggaacauugaucuggacaaguuaaagauuuuggcuuauggggaugauguaauuuuuuccuacaaauaucaacuugacauggaagcaauugccaaagaagguaucaaauaugggcuaacaauaacaccugcugauaaaucuaaugauuucaagcaacuuaauuacaauaauguaacauuucugaaaagaggauuuagacaggaugagaaacaucaauuccugauacacccaacauuuccaauugaagaaauucaagaguccauacgauggacaaagaaaccaucucaaaugcaggaacacgugcuaucauugugucacuuaauguggcauaauggcagagauguguacaagaaauuugaggagcguauacguaguguuggcgcuggucgugcacuauauauuccuccuuaugauuuauugcugcaugagugguaugaaaaauuuuaaauuguuuagauauagaaauauuaaacauuuaguuuuuuaguuuuau

SEQ ID NO: 18 - RNA, 7211 nt, Human rhinovirus
uuaaaacagcggguggguaucccaccacccgacccacuggguguuguacacugguauuuuguaccuuuguaugccuguuugcaccuccccaccccuuccaauuacccuuacccgaauuruauuaugcgguaacauuagaagaagugaacacagugcaauaggacguaucacauccagugauauaaagcacaagcaauucuuguuccccggagcuggauauagacugcuaacgugguugaagguccuuaaccguuauccgccaaccaacuacgagacggcuaguaauaucauguuugucuuugagcguucgaucaggugaauuccccauucacuaguuuggucgaugaggcugagaacuccccacaggugacugugucucagccugcguggcggccaacccagccacggcugggacgcccacugauagacauggugugaagacccaauugugcuugguugugacuccuccggccccugaaugcggcuaaccucaaccccggagccuuguaguguaagccaacacauacaaggucguaaugggcaacucugggacgggaccgacuacuuuggguguccguguuuccuuuauuuuuaucuuuugugucuuaugguuacaaguauugauuguaaccaugggugcacaggucucuacacagaaaagugguucacaugaaaaucaaaauuucuuguccaauggauccaaccaaacauucacaguaauuaauuacuacaaggaugcagccaguucaucaucugccggucaaucguuaucaauggaccccagcaaauuuacagaaccaguuaaggauuuaauguugaaaggagccccugcuuuaaacucaccaaauauugaggcuuguggauauagugauagaguugaacagauuacacuaggaaacucaacaauuacuacacaggaagcagcaaacacuguuguugcuuauggugaauggccuucauuuuugucugacguugaugccagcgacguuaacaagacaacaaaaccggacacaucagcauguagauucuacacauuacagaguaaaauguggaacccagauucuaagggaugguguuggaaauuaccugaugcuuuaaaagagaugggaauauuuggacaaaauauguuuuuccaugcccagggaagaacaggauauaccauucauguacaauguaaugcuaccaaauuucauaguggaugcuuguugguugugguuauaccugagcaucaacuugcuuccauuaaaggagccaauguaucaguuuuguaugauaaaacucacccuggggaaucaggaauugaucugaacacgaccgaugaggauggccccaugaaggauccacuuuauaugaugaauggaacauugauuggcaauaguuuaauuuuuccucaucaguucauuaaccucagaaccaacaacacagcuacaauuguugucccauauaucaacucaguacccauggauucuaugacuaggcauaauaaucuuucccugauggugaucccgauaguggguauaacagcaacuagcggaucugcacccucaauaccaguuacaguuaccauugcaccuauguuuuuggaauuaucaggcauaagaucgaggacuguaauucaaggccuccccacaguacuaacaccugguucagaacaauuucucacaacagaugauagacaaucacccagugcaaugcccaauuaugaaccaacaccacuuauacacauuccuggugaagucaauaaccugcuugaaauggcucagguagacacuuugauaccuaucaauaaugcaaaagauguaguuggcuuggauauguacagaauaccauugcaucagaacagacaagagacacaaguuuuugguuucagacuguuuuuaggugaugguguuuugaaaacaacacuacugggugagauuugucaguauuacacacacugggcaggcucuuugcguuuauccuucauguacaccggaccagcauuguccagugccaaguuguuaauagcauacacucccccaggugcagaaggaccaacaaaacguaaagaugccaugcuaggaacacauguagugugggauauagggcugcaaucaacagugguauugaacaucccauggacaucuggagugcaguauagauacacagauccggacacauacaccagugcuggauauguuucguguugguaucaaacaucacuugugcuaccuccucaaucacaacaaacugugugucugcuuggcuuuauaagugcuuguccagacuucaaacucagacuuaugaaagacacccaaucaauauaccaagacucagcauuaacugaagguuuggaggaugacuugguagaaguuauuguugacaaaacucagcaagcacuagcuucgaucaagagugguuccaaacauacccaaaaggcuccagcacugacugcaaaugaaacuggagcaacaaugcccacuaccccaucagauaguguagaaaccagaacaacacugaugcauuauguugguucagaaacaacauuggaaaacuucuuggguagagcagcauguguucauguaguugaaauaaaaaacaaagaaccccaggauguaaaucauaaaagugaacuuuuguucaacgauuggaaaauaaauuuaucaaguuuagugcaacuaagaaggaaaauagagcuguuuacauauguaagauuugauucagaauacacuauaauugcaaccaguucccagccaaauaaugccaaauauucaaguaaucucacuguucaagcaauguauauaccaccaggagcaccaaauccagucaaaugggaugauuacacauggcaaagugcuacaaaucccaguguauuuuucaaugugggaaaaucugcuagguuuaguguaccuuauuugggaauagcuucagcuuacaauuguuucuaugauggauauucccaugaugauacaaaaacuccauauggaauuaauguccucaaccauaugggcucaauggcuuuuagagugguuaaugaacaugacagucacacuacccauguuaaaaucagaguguaucauagagcaaaacaugugagagcauggguuccuagagccccuagggccuugcaauauuuacauauuggcagaacaaauuacgacccacagucuaaaaacccuauuaaaaccagaraaaccauaucaacauauggguuaggaccuagauuuggugguauacacacaggcaauguuaaaaucaugaauuaccaccuaaugacucaugaagacaauuuaaaccucaucacaccccucccagaaagagauuuggcuguaguuggggugggugcccaugguucagaaaccguaccacauuguaacugcacauccgguguguauuacucuagauauuacaacaaauucuacccuauaguaugugaaaaaccaacaugccuguggauagagggcaacaauuacuacccuaguagauaccagcaggguguuaugagaggugugggucccgcugaaccaggugauuguggugguaucuuaagaugcauucauggaccaauuggacuucucacugcaggggggagugguuauguuuguuuugcagacauuagaacauuagacauguuuaaugcugaguaucagggaauuucagacuacauucuaaauuuggggaaggcauuuggaacaggauucacagaacauauuagugaaaaagugacugagcuacaaaacauaucaaugggguauuugaauacuaaaguacugucaaaaauaguuaaaauuaucucagcacuaguuauaauuuguagaaaucaugaugauuuaauuacugucacugcaacucuggcauuguuagggugugauggaucaccuuggagauaccuaaaaauguacauuagcaaacacuuuuguauaccuuacauagaaagacaaucaaaugacuuaugguuuaaaaaauuuaaugacaugugcaaugcagcaaaaggauuggaguggauugcaaacaaaauauccaaguuaauugaaugggucaaacucaaaguacuuccacaagcuagagauaaguuagacuucuguaagagauuaaaacaguuagauauauuagaaagacaaauaaacacccuucauaugaaucaaauaagugauaaugacagagagguguuguucaacaaugugcugugguuagagcaaaugucacaaaaauuugcuccauuguacgcuguagaguccaagagaauuagaacacucaaaaacaagaugacaaacuucauacaauuuagauccaaacaucgcacagagccaguauguguucucauacacggcaccccuggaucagguaaaucauuaacaaccucccuaauuggaagagcaauugcagauaauuaugggucaucaguguacucacuaccaccagauccaaagcacuuugauggauaucagcaacaagcaguuguaauccuugaugauuugaaccagaaucccaauggugaggauauaaguaccuuuugccaaaugguaucaucaguugauuuuauuccuccaauggcuaaucuagauaacaaaggaauguuauucaccaguaauuuuguauuagccucuaccaacucccagacauugaauccuccaacuauuuuaaacccagaagcacuagcuagaagauuugguuucgauuuagacaugugcuuacauuccacuuucacaaaaucagguaaauugaaugcagcuuuagcaucagaacuguguaaggauugccauaaaccaacaaauuucaaacgaugcuguccccucauuugugguaaagcauuaagcuuaguggauagacguacaaauguuagauauaguauagaucaguuaguaacagcaaucauaacugagcauguuaauaaaaccaaaauauccaguucauuagagguuuuguuucaaggcccuguuuacaaagauuugaauauugaugugacaacuaccccaccaccagagugcauuguggauuuacucaaaucaguagacaaugaggaaguucgccaguauugucaagagaaaagauggcucaucccugaguuaccuaccaacauugacagggcagugaaucaagcaaccaguuugauuaauacuauucucauguucaucacuacacuugguauaguguacaugaucuacaaacuuuuugcacaaacacaaggacccuauucaggacuugauaguaaaucuaaacuaaaaccaccaacacucagagccgugguaacucaaggcccaaauacugaauuugcacucuccuuacucaggaaaaauauaguaacugugaccacugauaagggggaguuuacaggacugggaguauacgacagacugcuggucauuccaacacaugcacaaccgggugaacagguauuaauuaauggauuuucuacaaagcucaaggacaaauggaaguuaguagauccagaugauauaaauuuggaaauuacugugcuugaauuagauagaaaugagaaauucagagacauuagaauguuuauugcugaugaaccagaguguagcgaugcaacacucguaauaaacucaaacaauuucaaagacaccauauuaucaguugggucaaccacacuugcagguauuauaaacuugaguaacacucccacagccaggaugauucguuacgaguuuccaacaaaaacagggcaauguggagggguuuuguguucaacuggcaagauauaugguauacauguagguggcaaugggagacaagguuucucagcacaauuaaagaaacaguauuuuguucaaaaacagggucaaauuguuaguaaaagaaaugucagagaauuaaauauaaaaccaaucaauaccccuaauacaaccaaauuacacccuaguguuuuuuacaaugucuuuccaggaagcaaagaaccagcaguccuacauccagcugaucagagauuggaaguuaauuuugaggauucauuauuuucaaaauauaaaggaaauguagacauggaaaucucagauaauaugaaaguagccauugaucauuaugcugggcagcuuuugucacuagacaucccaacucaggaacucagccuuaaggaagccuuauaugguacagaugguuuagaacccauagauuuaaacacuagugcaggguauccauauguuagucuggggaucaagaaaagagcaauacuaaacaaagacaccaaggauacaucaaaaauggaagagugccuaaguaaauauggaauugacuugccauuagugacauacauaaaagaugaacucagaggcaaagauaaaauaaggcuagggaaaaguagauugauugaagcuucuagucucaaugauucaguaaauaugagaguaaaauuagguaacuuguacaaagcuuuccacaaaaauccagguauauuaacagguucugcuguagguugugauccagauacauucuggucaguuaucccauguuuauuagauggagaauugauugcuuuugauuauucaaauuuugaugccagccuuucaccagugugguuuaaaugccuugaaaauguucuuagaaaaauagguuuccaaugugcagacaugauucagcaaauuugcacuacacaucauauuuuuaaagaucaaauuuauguuguagaagguggcaugcccucuggcugcucuggaaccagcaucuuuaauucaaugauuaacaauauuauuauuagaacccucauuuuggauguuuauaaaggaauagaauuggauuccuugagaauaauagcauauggagaugauguaauuaucucauauccauucacuuuggaugcugaaaaaauaucagaacagggacucaaauaugguuuaacuauaacaccaccagauaaaucaccaaaauuuacaaaaauggauuggcauacagucacuuucuugaagcgacacuuuaaaccagaucaugaauuucccuuucuuguacauccagugaugccaaugucugaaauucaggaaucaauuagauggaccaaagacccuaaaaacacacaagaucauguuaggucacugugcaugauggcauggcauucaggugaggaagaauauaacaaauuuguugaaggaaucagaaguacagacauagguaaaguccucuuaauacccucuuauucuguucugagacgcagauggcuugaucuguucuaaauuuaaauauauagaguauuaauuuaguguagugaauuuuuccucuau

SEQ ID NO: 19 - RNA, 7217 nt, Human rhinovirus
uuaaaacagcggauggguaucccaccauccgacccacaggguguagugcucugguauuuuguaccuuugcacgccuguuuccccauuguaccccuccuuaaauuuccuccccaaguaacguuagaaguuuaaggaaacaaauguacaauaggaagcaucacauccagugguguuauguacaagcacuucuguuuccccggagcgagguauaagugguacccaccgccgaaagccuuuaaccguuauccgccaaucaacuacguaauggcuaguauuaccauguuugugacuugguguucgaucaggugguuccccccacuaguuuggucgaugaggcuaggaacuccccacgggugaccguguccuagccugcguggcggccaacccagcuuuugcugggacgccuuuuuacagacauggugugaagaccugcaugugcuugauugugaguccuccggccccugaaugcggcuaaccuuaaccccggagccuugcaacauaauccaauguuguugaggucguaaugaguaauucugggaugggaccgacuacuuuggguguccguguuuccuuuuauucuuuauauugucuuauggucacagcauauauagcauauauacugugaucaugggcgcacaagugucaacacagaagagcgguucacaugaaaaccaaaacauccuuacuaauggaucaaaucaaacuuucacggucauaaauuacuacaaagaugcagccaguucaucaucagcuggccaaucguucucaauggacccgucaaaauuuacugaaccggucaaggacauaaugcuuaaaggugcaccagcucuaaauucucccaacauugaagcgugugguuacagugacagaguugaacaaauaaccauuggcaauucaacaauuacaacccaagaagcagcuaaugcaauaguggcuuaugcugaauggcccagcuuuuuaaaagaugaugaugcuagugaugugaauaagcccacuagaccugacacaucugcuugcagauuuuacacacuugccaguaagacguggagucgugagucuaagggcugguguuggaaauugccggaugcucuuaaagacaugggaauauuuggacaaaacauguuuuaucauucucaaggcagaacuggguauaccauccauguacaauguaacgccacaaaauuucacaguggcacuuuacugguuguaauuauuccagaacaucaguuggcaucagcagagggugguaauguuucaguuuucuaugaccagacacauccaggagagagaggaauugauuugggaacaguuauugaaaagggaccaaugacugacccaauauacaauauggauggaacacuacuugguaauguucuuaucuuuccccaucaguucaucaaucugagaaccaauaauacggcuacaauaguaaccccauacauaaacucagucccaauggauucaaugaccagacacaauaacuugucacuucuugugauaccaguuguaccaauuacugccaacacuggaucaccacccaguauaccuguuacugugacaauagcaccaaugaaucuugaauuaucagggauuagauccaaaacaguggugaaagaacagggccuuccuacaacacuaacaccuggcucugagcaguucuuaaccacagaugauagacaaucuccuucagcucuaccaaauuaugaaccaacuccacucauacauaucccuggcaggguuaccaacuugcuagaguuggugcagguugacacaaugaucccaaucaacaacguaacagauuuggacacaauagaaaaguauagaauaccauugaugcagaaucagcaagaacaacaagucuuugguuuuucccuauuuuugggaggaggugucuuaaaaacaacacuacuaggugaaauagcacaguauuacacucauugggcagguucaauuagaauaucauucauguacacagguccagccuuaucuagugcaaagcuguuacuugcauacacaccaccaggagcaccaggaccuacaaauaggaaagaugcaauguuagguacucauauaauuugggauauuggcuugcagucaacuauagugaugaacauacccuggaccgccgggucucaauuuagauauacagacccagacacuuacacacacccaggcuuuauaucaugcugguaucaaaccucauuaguacuaccaccagauacaaaccagaaaguguucauaauuggauuuguuagugcaugcccagauuucaagcuuagauugcugaaggacacaucaucaauuucacagacugaggcacuaacagaaggguugggagaagaacuugaggaagugauagucgacaaagcgaaacagacuauugcuuccguuucgaguaacuccaaacacacucagaaaguuccaacacuaucagcaagugagacagggacaacucuuccuacaguuccaucugacaauauugagacuagaaccacuuacaugcauuaugaugguacagaaacaaguuuagagagcuuuuuaggcagggcugcauguguacauguuauaaccauagaaaacaaacuucccacaacaggccaaacucacaaagaacaaaaauuauacaaugauuggaaaauaaaccugucgagccuagugcaguugagaagaaagcuggaaauguucacauauguuagguuugauucagaguacaccaucauugcuacauccucgcaaccgcaggcagcacgauuuucaaacacacugacagugcaagcaauguuuauaccuccaggagcaccaaacccaguagaaugggaugauuacaccuggcaaagugcuucaaaccccagugucuucuucaauguugguaagucagcacguuuuaguguccccuaucuagguauugccucagccuauaauaauuucuaugauggcuauucacaugauaguaagaccacuguuuauggcauaaauguguuaaaucauauggguaguauagcauuuagaauaguuaaugaaaaugauguucaccucaccaagguuaaaaucagaguuuaccaccgugcuaagcacgucuuggcauggauucccagaccccccagagcaaaaccauaucuuucaauagguagaacuaauuaugagaaaacagggaacauaaucccaaaaagaaauaauaucucaacuuauggacuugguccaagauuuggugguguaugcacagggaauauaaaaauaaugaacuaucauuuaaugacucaugaggauacauuaaacuuacaaacuucacuuccagagagagauuuagcaguaauuaguauaaaugcucaugguucagaaacugucccucaaugcagcuguacaggugguguuuacuacuccagauacuauaacaaauauuacccagugguuugugagaaaccaacauguguguggauugaaggcaauaacuauuauccuagcagauaccaacaaggagucaugaaaggagugggaccagcugagccaggggauugugguggcauacucagguguauacauggaccaauugguauuuuaacagcuggggguggugguuauguuugcuuugcggacaucagagguuuggacauguuucaagcagaauaccagggaauaucagauuacauacuaaacuugggaaaggcauuuggcacugguuucacagaucacauuagugagaagguuagugaacuucaaaacauuacuaugggaugccugaauacaaagguucuuucuaaaguaaucaaaauugucucugccuuagugauuauauguagaaaucaugaagacuugguuacaguuacugcaacuuuagcacuacuagggugugauggcucaccuuggagauuccugaaaauguacaucaguaaacacuuccaccuacccuacauugagagacaaucaaaugacuuaugguuuaagaaauucaaugacaugugcaaugcagcuaagggauuagaauggauagcaaacaagauaucaaaauuaauagauuggauaaagaacaaaauccuaccacaagccagggacaaguuggauuuuuguaaaagacucaaacaguuagauauuuuagaaaggcagauugauaccuuacacaugaauuacacuaacgaaaaugauagggaaacauuauucaacaauguauuaugguuggaacaaaugucucagaaguuugcaccacuauaugccuuagaggcaaagagaauuaaaucauugaagaacaaauuaaccaauuuuauacaguuucguucaaaacauaggacggaaccaguauguguguugauucauggcacgccagggucagggaaaucucuaaccacuucuuugauugguagaucuauugcugauauacacagaucuucaguuuauucccuuccaccugaucccaaacauuuugaugguuaucaacagcaagcaguaguuauuuuggaugaucuaaaccagaaccccaauggugaagauauaaguacuuucugucaaauggugucgucgguugauuucauuccaccgauggcaaacuuagauaauaaaggcauguuguucacaaguagcuuugucuuagccucuacaaauucucagacacucaacccuccaacuguguugaacccugaagcauuagcacguagauucggguuugacuuagacaugugcuuacacucaucauuuacaaaaucgggcaaauugaauacugccauggcaugugaacuguguaaagauugucauaaaccaacaaacuuuaaaaagugcuguccguuaauuuguggaaaagcucucaguuuaguagauagacacacuaaugucagauauaguauagaucagcugguuacagcuauacugcaggagcacaauaauaagacaaaaauuacuaacucccuugaaauucuguuccaagguccaguguacaaagacaugaccauugauguuuaugauaaaccuccaccugauuguauaguggaccuacucaaaucaguugauaguguagaagugagacaauacuguagagagaagaaauggcuuaucccugaaauaccaacaaauauugacagggcaguuaaucaagcgacaucuuuaaucaauaccauacucauguuuaucaccaccauggguauaguauacaugaucuacaagauguuugcucaaacucaggguccauauucuggauuagacaguaaagccaaacugaaagcaccgguacuacgugcaguaguuacucaagggcccaacacugaauuugcauuaucauugcuuaggaagaacauugucacaauaacaacagccaaaggagaauucacagcuuuagggauuuaugauagaaucuguguuaucccuacacauucacaaccagaaaaugagguucuucuuaaugguuacaauguuaaaauuaaagacaaguggagacugguggauccagauaacuugaaucuagaaauuacaguuuuagaacuagacagaaaugaaaaauuuagagauauuagaauguuuauugcugaugaaucagaaugucccgaugcaagccuggugauccacuccaauaauuauaaagauacuauaaugucugugggucacauuacgauggcuggcauaaucaauuugaguaacacacccacagccagaaugauuagauaugauuacccuaccaagacagggcagugugguggagucuuguguucaacagguaaaauuuauggaauucaugugggugguaauggaagacaagguuuuucagcucagcuuaaaaaacaguauuuuguccaaaaacaaggugaaauaauuaguaagaagaagguacaugauuugggccuaaaaccaauaaauacaccaaguaaaacaaaauuacuccccagugucuuuuauaauguguuuccagggacgaaagagccagcaguuuuacauccagcagaugaaagauuagaaguggauuuugaggaaucacuguucucaaaauacaaagguaauguaaaaauggaaauuagugaaaacaugaccauugccauugaccauuaugcaggucaguugcuuucuuuggauauucccaccaaagaacuuucauuaaaagaagcuuuguauggcacagauggcuuggaacccauugaccuuaauaccagugcaggauacccuuauguuaguuugggcauuaagaaaagggcaauauugaacaaagaaacccaagacacaaccaaaauggaagaauguuugagcaaauauggcauugauuuaccauuaguuacauacauuaaagaugaacuuaggggaagggacaaagucagauuaggaaaaagcagauuaauagaagcaucuagucugaaugauucugugaacaugagggucaaguuaggugaguuguauaaggcauuccacaagaauccugggauauuaaccgggucugcaguagggugugauccagacacuuuuugguccauuauaccaaauuuauuagauggugaauuguuagccuuugacuauucaaauuuugaugcuaguuuauccccagugugguuugacugcuuagagcuagugcuuagaaaauuggguuuugagucggcugaucuaguaaagaaaauaucaacuacccaucauauauuuaaggaucagauuuauguaguugagggaggaaugccaucagguugcucaggcacuaguauuuuuaauucaaugauuaauaauauaauuauuagaaccuuaauucuugauacauauaagggcauugauuuagacaaauugagaauaauagcauauggagaugauaucauagcuucauauccuuuugaauuggauucagaaaaaauugcucagcaaggugcuaaguauggucugacuaucacaccaccagacaagucuacacaguuucauaaaauaacaugggagaauguaacauuuuugaaaagauacuucaggccagacaaacaguuuccuuuccuuguucauccuguuaugccaaugucagacauacaugaaucaauuagauggacaaaggaucccaagaacacucaagaccacgugagguccuuauguauguuagcauggcacucuggugagaaagaauaugaugaguuuguacguggcauccgcaguacggacauagggaagguucuugugauaccaccuuacucaguucuuagacauagauggcuugagcuauucugaauuaaacuaaauacauauauagagauuuaauuugaguagaauuuuuccucuau

SEQ ID NO: 20 - RNA, 7123 nt, Human rhinovirus
uuaaaacuggaucuggguuguucccaccuggaucuccuacauggaguuguacucuauuauuccgguaaucuuguacgccaguuuuauaccccuuucccuuuuguaacuuagaaguuaaacacacagaccaauaggugauggcuauccaagucauuaacggucaagcacuucuguuuccccgguuuaaauugauacgcuccaccagggcgaaaacaauuuaaaucguuauccgcaaaaugacuacgcaaagccuaguaacaucuugaagaacuuaugguuggucguuccacuaaaccccauaguagaccuggcagaugaggcuagaaauaccccacuggagacaguguucuagccugcguggcugccugcacacccuaugggugugaagccauauuuuugacaaggugugaagagccccgugugcucauuuugaguccuccggccccugaauguggcuaaccuuaacccugcagcuagugcaugcaauccagcauguugcuagucguaaugagcaauugcgggaugggaccaacuacuuuggguguccguguuucacuuuuuccuuuuauuugcuuauggugacaauauauauaguacauauauauuggcaucaugggcgcucaaguauccagacaaaauguuggaacucauucuacccaaaauucaguuucaaauggaucgaguuuaaauuauuuuaacauaaauuacuuuaaggaugcugcaucaaguggagccucaaaacuugaauuuucucaagauccuagcaaauucacugacccggugaaagauguuuuagaaaaagguauuccaacacuacaauccccuacgguggaggcaugugguuauucagaucggauaaugcaaauuacaagaggugacuccacaauaacaucucaagauguggcuaaugcaguuauagguuauggagucuggccacacuaucugagugcugaagaugcuacugcuauugauaaaccuacccagccagacaccucaucaaauagauuuuacaccuuggagaguaagacauggaauaggcaauccaaaggauggugguggaaauugccagaugcacuuaaagauaugggcauauuuggagaaaauauguauuaucauuaccuuggcaggagugguuauacaguacauguccaaugcaaugcuaguaaguuucaucaaggaacauuacugguagugaugauaccugagcaccaacuggcaaguguagguacugauaaagucggaccuggauaugcuuucacgcaucccggugaggcagguagacagauuggcaaugugagugaaccgacuucaaagcauccaagugaugacaauuggcucaacuuugauggcaccuuacuggguaauguucuuauauucccacaccaauuuaucaauuuaaggagcaauaauucugcaacaauaauaguuccuuaugugaaugcugucccaauggauucaauguuaagacauaauaauuggaguuuagugauaauuccaaucagugaauuacaagcagagaaugccacuaaugucacggucccuauuacuguaucaauuaguccaauguuugcugaauuuucuggagcacgugcaaggccagcaagagcuacuacacagggauuaccuauauauaugacaccagguucaggccaguuuaugacaacugaugauuuccaaucaccuucagccuuaccaugguaucacccaaccaaagaaauuuuaauuccaggagaaguaaaaaauuuaauagaaauaugucaagucgacacauuaaucccuaucaacaauguaaguagcaauuugagaaagguaaaucuuuacacuguacaauuaaccagucaaacaacaccagcccagcagguuuuugccauuaaaguggauauugcuucacaaccuuuagcaaauacaaugcuugggcaaauugcuaguuacuucacacacuggacuggaagcuugcgcuuuagcuuuauguucuguggaacagcaaauaccacucucaagcuacuuuuagcauacacaccaccugguauugggaagccagaaacuagaaaacaggcuaugcuugguacacauauaguuugggauguuggguugcaaucaacaguaucuuuaguugucccauggguuagugcuagucacuuuagguacaccucuagugacgaacauucagcagcuggauacauaacauguugguaucaaacacaacuugucuucccuccaaacacuccaaauacagcugauauguuguguuuuguaucagcuugcaaagauuucugcuuacguauggcuagagacacagacaugcauauucauaaugaaauuaucacacagaacccaguugaaaacuauguggaugaggugcuuaaugaaguuuuaguugugccuaacaucagggagagccacccaagcacguccaacucugcaccaaucuuggaugcugcugagacuggacauacuaguaauguacaaccagaagauaccauugagacucguuauguacaaaccucacauacuagagaugaaaugagcauugaaaguuuucuugguagaucaggauguauacauguuucaacaauaaaagcaaaucaggcacaugacgccaaguucgauaaauggaauguuaacuuacaagaaauggcucaaauuaggcgcaaauuugaaauguucacauaugugagauuugacucagaaauaacucugguuccaugcauugcaggacgugguaaugauauaggucacauaguuaugcaguacauguauguaccaccuggagcuccaguaccaaaugacagaaaucauuuugcauggcaaucagggacuaaugcaucaauauucuggcaacauggucagccuuucccaagauuuucauuaccauuccuaaguguugcaucugcuuauuacauguuuuaugaugguuacaauggaggugaucauacagcaacuuauggcaccacagugguuaaccggauggggacgcuuugugucagaauuguuacaggcaaacaagcucaugauguucaaguuacaacaaguaucuaucauaaagcuaaacauguaaaggcgugguguccuagaccaccaagaguugucccauacaaguauguuggccuaacuaauuacacacuuaaagaagaagauacaguuguggaauccagaccaagcuuaaugacagcuggaccaagugacauguauguccacguuggugacuuaauauauagaaaucuucaccuuuguaacucagaaaugcaugauucaauccuaauaucauauucaucagauuuagucauuuaucgaacaaacaccacagguaaugacuauaucccuacuugugacuguacugaugcaacuuauuacuguaaacauaaggauagguauuaucccaucaaagucacuagucaugauugguaugagauacaagaaagugaauacuauccaaaacacauccaguauaaucuuuuaauuggugaagggccaugugaaccaggugauuguggaggaaaauuacuauguaaacauggaguaauuggaauaauuacugcagguggggagggucauguagcauucauugaucucaggcaauuccauugugcagaugaacaaggaauaacugauuacauccacauguuaggugaagcuuuuggaacagguuuuguugauagugucaaggaacaaauaaaugccauuaacccaauuaacaauauuagcaagaaaauaauuaaauggcuccuuaggguaauuucugcaaugguuauaauaauuaggaacucuucugauccacaaacaaucauagccacauuaacuuuaauuggaugcucaggcuccccuuggagauuucuuaaagagaaauucuguaaauggacccaauuaaauuauauacauaaggagucugacucauggcuuaagaaauuuacugagaugugcaaugcagcuagagguuuagaauggauuggaaauaaaauaucaaaauuuauugaguggaugaaaucuaugcucccucaagcucagcuuaagguaaaauacuuaagugagcuuaaaaaauuaaguuuccuugagaagcagauggaacaucuaagaguagcagacacucaaacucaggaaaaaauuaaacaugaaauugacacucuucaugaucuuucuuguaaauuccucccacuuuaugcuagugaagcaaagagaaucaagauauugcacaauaaguguaguacaauaauuaaacaaaggaaaagaugugaaccaguugcuguuguuauacauggugauccugguacugguaaaucuaugacuacaagcuuccuagcuagaaugauaacgaacgaaagugacauauacuccuuaccaccugaccccaaauauuuugauggauaugaccaacaaagugugguuauaauggaugauguuaugcaaaauccaaguggagaugacaugacuuuguuuugucagauggugucuaguguuaccuucauaccucccauggcugaucuaccugauaaagguaaaccuuuugacucacgauuuguacuauguaguacuaaucauaauauguuagcaccucccacaaucacuucauugccagccaugaacagaagauucuuuuuugaucuggauauuguggugugugacaaguacaaagauucacaaggaaagcuuaauguaucagcugccuuucaacccugugauguggauauaaagauuggaaaugcucguuguuguccauuuaucuguggcaaagcuguuaauuucagggaucgcaauaccugucagacuuacacuuuagcacagguauauaaccaaauacuugcugaagacaaaaggcguagacgaguuauugauguuauggcagcaauuuuccagggucccauuacucuugaagggccuccaccugcagcaauaaaugaucuauuaaaaucagucagaacuccagaagugauaaaguacugugaggaaaacaaauggauaauaccaacugaguguaaaguugagagagaucuuaauuuagcaaacaccaucauuucaauuauugcuaauaucaucaguauuucuggaauuauuuauguaauauauaaacuuuucuguacacuacaagggccauacucaggugaaccaaaaccgaaaacaaagguaccggagaggaggguuguagcccaaggaccggaagaagaauuugguaggucacuuauuaaacauaauucauguguugugucaacucagaaugguaaauuuacagguuuaggaauuuaugauagaacacuaaucuuaccaacacaugcagacccugguagugaggugcaaauugauggaauuacaacuaaaguagaggauucuuuugauuuauauaauaaagaugggguuaagcuggagaucacagucuuaaaacuuaagaggaaugagaaguucaaggacauuagaaaauacauaccagaaaaugaagaugacuauccagauugcaauuuggcccuaucugccaaucaaccagagacuacuauaauuaauguaggggauguagugucuuauggcaacauucuacuaagugguaaucagacugcuagaaugcuuaaauauaauuacccaacaaaaucagguuacuguggugguauuuuguauaagauuggucaaguucuuggcauucacguagguggaaaugggaaagauggguuugcugcuauguuauuaagaucauacuuuucugaaacacaagggcagauaauuacuuccaaaucuacaagugaauguggucugccuagcauucacacaccaagcaaaaccaaguugcagccuagugucuuuuaugaugucuuuccagguaacaaagaaccagcuguccucucuaguaaugauccuagguuaaaaguagauuuuaaagaggccuuauuuucaaaauauaaagguaacaaucaguguacuaugaaugaucauaucaggguggccaucucccauuauucagcacaacugaugacauuagacauugaucccaaaccuauaucuuuagaagaaagugucuuugguauagagggcuuagaagcuuuagaucuuaauacuagugcaggguucccuuacauauccauggguaucaagaaaagagauuuaaucaacaaacaaacuaaggaugugacaaaacucaaaauggcauuagauaaauaugguguugaucuaccuaugguuacuuuucucaaggaugaacucaggaagagggaaaaaauuugugcuggaaagacucgugugauugaagccaguaguguaaaugauacuauacuguucaggacaacuuuuggcaaucucuucucaaaauuucacuuaaauccagguguugucaccgguucugcaguggggugugauccagaaacauuuuggucaaaaauaccagugaugcuagauggggaauguauaauggcuuuugauuacacaaauuaugauggaaguauacacccuaucugguuccaagcuuuaaaggaaguguuagcaaaucuaucauuugaaccagcuuuaauagauagacuguguagaucuaagcauauuuuuaaaaauacauauuaugagguugaaggaggaaucccaucagguugcucuggaacuagcauuuuuaacacuaugaucaauaaugugaucauuagaacccuuguuuuagaugcuuauaaaaacauugauuuggacaaauuaaagauucuagccuauggggaugaugugaucuuuucuuauaaauaucagcuugauauggaggcaauugcuaaagaaggcacaaaguacggauuaacaauaacacccgcugauaaaucugauuguuucaaacaacuuaauuauaauaaugugacauuuuugaaaaggggauuuagacaggaugaaaaacauaauuuucuaauacacccuacauuuccaguagaagagauccaagaguccauucgauggacaaaaaagccaucucagaugcaggaacaugugcuaucgcugugucauuuaauguggcauaaugguagagacguguacaagcmguuugaggaucggauacguagugucagcgccggucgugcacuauauaucccuccuuaugacuugcuuuugcaugagugguacgaaaaauuuuaaauuguuuagauauaaaaguauuaaacaguuaguuuuuuaguuuuau

SEQ ID NO: 21 - RNA, 7099 nt, Human rhinovirus
uuaaaacuggauccagguuguccccaccuggaucucccacagggagugguacucuguuauuacgguaacuuuguaugccaguuuuauccuccccaccccuauguaacuuagaaguuuuacauaaagaccaauagguaguaaucauccagauuacuuaaggucaagcacuucuguuuccccgguugauguugauaugcuccaacagggcaaaaacaacagaaaucguuacccgcaaagugccuacgcaaagccuaguagcacuuuagaaguugucuggcuggucgcuccgccauuuccccugguagaccuggcagaugaggcuagaaauaccccacuggcgacaguguucuagccugcguggcugccugcacacccuaugggugugaagccauacaauggacaaggugugaagagccccgugugcucacuuugaguccuccggccccugaauguggcuaaccuuaacccugcagcuagggcacacaauccaguguguaucuagucguaaugagcaauugcgggacgggaccaacuacuuuggguguccguguuucucuuuuauccuuauguuugcuuauggugacaauauaugaauauauauugacaccaugggcgcacagguaucuagacaaaauguuggaacucacuccacacaaaauucuguaucaaauggaucuaguuuaaauuacuucaauaucaauuauuuuaaggaugcugccucaaauggggcaucuaaauuggacuucacgcaagacccuaguaaauucacagauccaguuaaagauguuuuggaaaagggaauaccaacacuacaaucaccuacaguggaagccugcggguacucugauaggauuauacagauuacuagaggagauucaacaauaacuucacaagauguggccaaugcuguuguugcauacgguguuuggccacauuacuugucuuccaaagaugcuacugcaauugauaaacccucucgcccugacacaucuuccaauagguuuuacaccuuaaagaguauaauuuggucuggagcuucaaagggauggugguggaaauugccggacgcauugcgagauauggguauuuuuggugagaauauguuuuaccauuaucuagguaggaguggguauacagugcauguacaguguaaugcaacuaaauuccaucaagguacacugauuguugcaaugauaccugagcaucaaauugcuaguuuacaacacggcaauguaaauguuggauauaaauucacccauccaggagaagaggggagagaagucagaucaaauagaacugaguaucucggucaacagcccacagaagaguacuggcucaauuuugauggcacauuauuagggaacaucacgauauuuccucaccaauucauuaacuugagaagcaauaacuccgccacaauaauugucccauaugucaaugcaguccccauggacucgaugcggagucacaacaacuggagucugguaauaaucccaaucuguccucuugaaacaaugagcacuaucaccacaguaccuaucacaauuuccauuaguccaaugugugcagaauuuucuggugcgcgugcaaaaagucaaggauuaccaguguuaguuacaccagguucaggacaauuuuugacaacggaugacuaccaaucuccgugcgcguugccgugguaccauccaacuaaagaaaucuuuauuccuggugaagucaagaauuuaguugagaucugucaaguggauagcuugauaccaauuaauaauacagaagauaauaucaccagugaagccauguacuccauaaaguuacaaucaucaguugaucaggauaagauauuuucccuuagaacggauauugcuucacagccucuagccacuacucuaauuggugaaauauccaauuacuucacacauuggacagggagucuacgcuucagcuucauguucugugguacugccaauacuacuguuaagcuacuauuagcauauacaccaccugguauugcugagccuacaacaaggaaggaugcaauguuggguacucauguuauaugggauauagguuugcaauccacaauaucaaugguagugccuuggauuagugcuagucauuauagaaauacaucaccagauguaucuccaucuggauacauaaccuguugguaucaaacuggauuaguaaucccaccugaaaccccccccacggccagauuacugugcuucguauccggguguaaagacuucugcuugcgcauggcucgggacacgagucuacacaugcaaaaaggugugauagaacaaaacccgguugaaaauuuuguagaugaaguucuuagugaaguuuuaguuguuccaaacauuaacaguagucacccuacuacaucaaacucugcuccggcauuagaugcugcagaaacaggacauacuaguaauguucaaccugaagaugucauugaaacuagauauguucaaacaucacaaacaagggaugaaaugaguuuagaaagcuuucuugguagaucaggauguauacacgagucuaaauuagaacuugagcuugcacgcuaugauaaaaagaacuuuaccacauggaauauuaaucuucaagaaauggcccaaauuagaagaaaauuugagcuauucacuuacacuagauuugauucugagauaaccuugguuccguguauuucagcucucagccaagauaucggacacauuacaaugcaguauauguauguuccaccuggcgcuccaauucccgagagcagaaaugacuaugcauggcagucuggaacaaaugcaucuguuuuuuggcaacacggacaaacauacccaagauucucccuaccauuuuugaguguagcaucugcuuauuacauguucuaugauggauacaaugagggaggcacaaauuaugguacagugagcacaaacaacaugggcacacuguguuccagagugguaacagaaaaacacauucaugaugugcgcauaaugacaagggucuaccacaaggcuaaacaugucaaagcgugguguccacggccaccuagggcgcuugaguauacccgugcucaucgcaccaauuuuaaaauugauggcagggaaguuaaaucaaggguugaacacagagcuagggugacgacagcuggcccuagugauauguauguacauguggguaaccucaucuacagaaaucuccaucucuuuaacucugaaaugcaugauuccaucuuaguaucuuacucaucagauuuaaucauuuaccgaacaaacacuguaggugaugauuauauuccuuccugugauuguacccaagcuacuuauuacuguaaacauaaaaauagauauuuuccaauuacugucacaagccaugauugguaugagauacaagaaagugaguauuacccuaagcauauacaguacaaucugcuaauuggugaaggaccuugugagccaggugacugugguggaaaguuacuguguaaacaugggguuauaggcauuguaacagcugguggugacaaucauguggcuuucauugaccuuagacauuuucacugugcugaggagcagggaauuacagauuauauacacauguugggugaagcauuuggaaauggauuuguagauagugucaaagagcaugugcaagccauaaauccaaucgguaauauuagcaaaaaaauuauuaaauggauguugagaguaauaucagcaauggucauaauaaucaggaauucuucugacccgcaaaccauacuagcaacacuuacauuaauuggaugcucaggauccccauggagguuccuuaaagaaaaauuuugcaaguggacacaacuuaguuauauacauaaggagucagauucaugguugaaaaaauucacugaggcaugcaaugcagcaagaggucuugaauggauaggaaacaagauauccaaauucauugaguggaugaaaucaaugcucccacaagcccaacuuaaagucaaguauuuaaaugaacuuaaaaaacuaagccuguaugagaaacaaguugagaguuugagaguggcagauauuaagacacaggaaaagaucaaaauggagauugacacccuucaugacuugucaugcaaauuuuugccacuauaugcaagugaggcaaaaagaauaaagaaucuucacaucaaaugcaacaauauuauuaaacaaaagaagagaugugaaccaguagcuauagucauucauggaccaccuggugcuggaaagucuauaacaacaaauuuucuggcuaaaaugaucacaaaugacagugauauauacucccugcccccagauccaaaauauuuugaugguuaugaucagcaaaguguagucauuauggaugacauuaugcaaaauccagcuggagaugauaugacuuuguuuugucaaaugguaucuagugucacuuuuauaccaccuauggcugauuuaccagauaagggcaaagcuuuugacucuagauuugucuuguguagcacaaaucauucucuuuuggcaccaccuacaaucaccucacuuccugcuaugaauagaagauucuuuuuagauuuagauauaauagugcaugaucgcuuuaaggauccucaaggaaaacuuaauguagcagcugcuuuuagaccaugugauguggacaauaaaauaggaaaugcacgcuguuguccauuugugugcggcaaagcaguuucuuucaaagaccgcaauaccugcaacaaauauacucuagcacaaaucuacaauauaaugcuugaggaggaucaacgcagaagacaaaugguugaugucaugucagcuauauuucaaggaccaauagauaugagaaauccaccaccacccgccaucacugacuuacuucaagccgucagaacuccugaagucauuaaguacugugaagagaauaaguggauuauuccagcagagugcaagauagaaaagggauuaaaucuagccaacacaauuauaacaauuauugcuaauguuauuaguauagcaggcauuauauaugugaucuacaaauuguucugcacauuacaaggaccuuauucaggagaacccaaacccaaaacuaagauuccagaacggcgugugguggcucagggcccagaggaagaauuugggcuauccuugauuaaacacaauucaugcguuguuacaacagaaaauggcaaguuuacaggucuugguauacaugauagaaucaugauuguaccaacacacgcugauccgggaaaggaaauccagauugauggcauaacuacaaaaguaacugauucauaugacuuauauaauaaagaugguaucaagcuugaaauaacaguuuuaaaguuagauagaaaugagaaauuuagagauaucagaaaauauauaccuaguaaugaagaugauuacccagauuguaauuuagccuuauuagcaaaccaaccugaaccuaccauaauuaauguuggugauguuguauccuaugguaauaucuugcuuagugggaaucaaacugccagaaugcuuaaauacaauuacccaacuaaaucuggguauugugggggugugcuauacaaaauuggacaggugcuggggauacauguagguggaaaugguagagauggguucucagcuauguuacuuagauccuacuuugcugacacacagggucaaauaacuuuaucaaaaagaaccagugaguguaaccucccuaguauacacaacccauguaaaaccaaauuacaacccaguguguucuaugauguauucccugguucaaaagaaccugccguauuaucugaaaaagacacuagauugcaaguugacuucaaugaggccuuguuuucaaaauauaaaggaaauacacauugcacaaugaaugaccauaugaaaauugcaucaucacauuaugcagcacaauuaaucacucuugauaucaauccaagcccuauuacgcuugaagacagugucuuugguacagauggucuggaagcccuugaucuaaauaccagugcaggauuuccauacauuacaaugggaauuaaaaagagggaucuuauaaauaacaggacuaaagauauaaguaaacuuaaagaagcaauugauaaauauggaguugauuuaccaaugguuacuuucuuaaaggaugagcuuagaaaaccagagaaaauaucaaagggaaaaacuaggguuauugaggccagcaguguuaaugauacuuuguuguucagaacaacuuuugggaaucuuuuuucaaaauuucaucugaauccaggaauugucacuggaucagcaguggguugugauccugaaacuuuuuggucaaaaauaccagcaaugcuggaugauaaauguaucauggccuuugauuauacaaacuaugauggcaguauacauccuauuugguuugaagcucucaaacuaguacuuucagauuuaucauucaauccaauguuaauagacagguuauguaaaucuaagcauauauuuaaaaauacauacuaugaaguugagggaggugucccaucuggguguucuggaaccagcauauucaauacuaugauaaauaauauuauuauaaggacuuugguguuagaugcauacaagaacauagauuuagauaagcuuaaaauaauugcuuacggugaugaugugauauuuucauacauuuaugaauuggauauggaagccauagcaauggaggguguuaaauaugguuuaacuauaaccccugcugauaaauccacuacuuucagaaaacuagacuauaguaauguuacuuuuuuaaaaagaggauuuaaacaagaugaaaaguacaacuuuuuaauucaucccacuuuuccugagaaugagauauuugaaucaauuagauggacaaagaaaccuucacagaugcaugagcauguuuugucuuugugucauuuaauguggcauaacggacgugacgcauacaaaggauucguggagaaaauacgcaguguuagcgcuggacgcaugcuguauauuccuccauaugauuugcucuugcaugagugguaugagaaauuuuaaacagauauagaaauauuaaacuauuaguuuacuaguuuuau

SEQ ID NO: 22 - RNA, 7131 nt, Human rhinovirus
uuaaaacugggugcgaguuguucccacucgcacuuccuacguggaguaguacacuauuauuacgguaauuuuguacgccaguuuuauaacccuuccccuuuuguaacuuagaaguuugaacuugagaccaauagguggugaucaaccagaucgccaaaggucaagcacuucuguuuccccggucaacauugauaugcuccaccagggcaaaaacaauugcgaucguuacccgcaaagugccuacgcaaagcuuaguaauaucuugaacgauauaugguuggucgcuccacuaauccccauaguagaccuggcagaugaggcuggaaacuccccacuggcgacaguguuccagccugcguggcugccugcgcacucucacgagugcgaagccauauauuugacaaggugugaagagccccgugugcucacuuugaguccuccggccccugaauguggcuaaccuuaacccugcagcuagugcauacaaaccaguauguggcuagucguaaugagcaauugcgggacgggaccaacuacuuuggguguccguguuucacuuuuucuuuuaugguuugcuuauggugacaguauauaguguauauauuguuaccaugggugcacaagucuccagacagaauguugguacgcauuccacacagaauaugguuucaaauggauccaguuuaaauuacuucaacauaaauuauuuuaaggaugcagccucuaguggugcuucaagauuggauuuuucacaagacccaagcaaauucacugacccagucaaggauguucuugaaaagggaaucccaacuuuacaaucuccuacaguagaagcaugugguuacucagacagaauaaugcaaauuacaagaggugauucuacaauaacaucacaggauguugcaaaugcagugguagguuauggaauauggccacacuacuuaagugcaaaagaugcuacugccauugauaaacccacgcagccagacaccucaucaaauagauuuuauacacuagagaguaaaauauggacacgagauucuaagggauggugguggaaguuaccagaugcacuaaaagacauggguauauuuggggaaaacauguauuaccauuaucuugguagaagugguuauacugugcacguucagugcaacgcuaguaaauuccaccaagggacuuuauuaauuaugaugauaccugagcaucagcuagcaaaugaaaaccguacuagagcagaugcuggauauaacuucacacauccuggugaguuagguagggaaguugguaacagacgcaacccccaugacaaccuuccaagugaugacaauuggcuuaacuuugaugguacuuuauuaggcaaugcucuuauauauccucaccaauucauuaacuuaaggaguaauaauucugcaacauugauagucccuuaugugaaugcuguuccaauggauucaaugcuuagacauaauaauuggaguuuagugauaauuccaauuugugaguuacuaguagacucuacagucaaugcuauaguccccaucacuauaucaauaaguccaauguuugcugaauucucuggagcacgugcaaaaccagaagcugccucacaaggccucccaauuuauaugacaccuggcucaggccaguucaugacaacugaugacuuucaaucaccuucagccuuaccaugguaucauccaaccaaggagauuuugauuccgggagaagucaaaaauuuaauagaaaugugucaaguugauaccuuaaucccuauuaacaauacaaugcagaauuuaaggaagguaaauauguacaccauacaauuguccagucaaacagaaauggcccaagagaucuuugcuauuaaaguagacauugccucacaaccuuuggcaaacaccaugcuuggagaaauugcaaguuacuucacacacuggacugguaguuugcguuucagcuuuauguuuuguggcacagcaaacaccacccucaaauuacuuuuggcauacacaccaccaggcauugguaaaccaagcaguaggaaacaagcuaugcuugggacacacauaguuugggacguuggauuacaaucuacaguaucucuaguugucccauggguuagugccagccauuuuagauacacaucuagggaugaacauucagcagcuggguauauaacguguugguaucaaacaaauuuuguuuuucccccaaauacuccuaauacagccaacauguuguguuuuguaucagcuugcaaggauuucuguuuacguauggcuagagacacagauaugcauauucaagaugaugcuaucacacaaaauccaguugaaaacuauguggaagagguucuuaaugaagucuuaguaguaccuaauaucaaagaaagccauccaagcacaucuaauucugccccaauccuggacgcugcugaaacuggacacacuaguaauguacaaccagaagauacaauugaaacucgcuacgugcaaacaucacaaacaagagaugaaaugagcauugaaaguuuccuugguaggucaggauguguacauacuucaauaauagaaccagauggacuccaugauagcaaauauaaaguauggcacauuaauuuacaagagauggcccagauuaggcgaaaauuugaaauguucacauauguaagauuugauucagaagugaccauaguuccaugcauugcaggacaugguagugacauaggccauauagucaugcaauacauguauguaccaccuggggccccaguaccaacaaauagaaaacauuuugcauggcaaucagguacuaaugcaucgauuuucuggcaacauggacaacccuuuccaagauuuacauuacccuuuuugagugucgcauccgcuuauuacauguuuuaugaugguuaugauggagacaaaaguggagccaaguaugguacuacaguaguuaaucgcaugggugcacuaugcaugagaguugucacuaacaaacaagcucauaaaguugaaaucacaaccaauauuuaccauaaggccaaacauguaaaggcaugguguccuaggccaccuagagcaguuccauacagguauguuggaucaacaaacuacaaaccugaugaaaaugaaguuacaaucuuuguuaaacacagggauaauccaaagauuaucacagcaggaccaagugaucuguuuguacauguagguaaucuaauauauagaaauuuacacuuguucaacucagaaaugcaugauucaguguuaguaucauauuccucagacuuagucauuuaccgcacaaacacuacaggcaaugacuauauuccuacaugugauuguacccaagcuacuuacuauuguaaacauaaagauagguauuauccaauuguugucaccagucaugauugguaugaaauucaagagagugaauacuacccaaaacauauucaauauaaucuuuuaauuggugaaggaccaugugagccaggagacuguggaggaaagcuauuguguaaacauggagugauuggaauaauaacagcagguggggaagggcauguggcauucaucgaucucagacaauuccacugugcagaugaacagggaauaacugacuacauucacauguuaggugaagcuuuuggaucgggauucguugauagugucaaagaucaaauaaacgcuaucaacccaauuaauaacaucaguaagaagauaaucaagugguuacucaggauaauuucugcaaugguuauaaucauuagaaauucuucugacccacaaacaauuguggcuacacuaacauugauugguugcucagguuccccuuggcgauuccuuaaagagagguuuuguaaauggacucaacuaaauuacauacauaaggaaucugauucauggcuuaagaaguuuacugaaauguguaaugcagcuagagguuuggaauggauuggaaauaaaauaucaaaauuuauugaguggaugaagucuaugcucccccaagcucaacuuaaaaucaaguaucugagcgagcuuaagaaacucagcuuucuagaaaaacaaauagaauaucugaggguugcugauucccaaacacaggaaaagauuaaaugugagauugauacuuuacaugaccucucuugcaaauuuuugccacucuaugcuagugaagccaaaagaauaaaaauucuacauaauaaauguaacacaauuaucaaacaaaggaaaaggugugaaccaguugcaguugcuauacauggugagcccgguacugguaaguccaugaccacaaacuuucuugcuagaaugauaaccaaugauagugauauuuauucuuuaccaccugaccccaaauauuuugauggauacgaucaacagagugugguuaucauggaugauauuaugcaaaauccaaguggggaggauaugaccuuguuuugccaaaugguauccaguguuacauuuauaccaccaauggcugaccuaccugacaagggcaaaccuuuugauucuagauuuguauuguguagcacuaaucauaacuuguuagcaccaccuacaaucacuucauuaccggcuaugaacagaagguucuuuuuagauuuagauauuruaguaugugauaaauauaaagauccacaaggaaaguuaaauguggcugcugcuuuucgaccuugugauguggauacaaaaauuggaaaugcucgcuguuguccuuucauuugugguaaagcuguuauuuuuagggaucgcaauaauugucaaacuuauacucuggcacaaguguacaaucaaauacuugcugaagacaagagacguaggcaaguuguggaugucauggcagcaaucuuucaggggccuauuacucuugaagggcccccaccugcagcaauaaaugaucuauugaaaucaguuagaacuccagaggucauuaaauauugugaggauaacaaauggauagugccaacugaguguaagauugagagagaucuuaauauugcuaauaccauuauuacaauuauugcuaauauuauuaguauuucuggaauaauuuauguuauauauaagcuuuucuguacauuacaaggaccauauucaggugagcccaagccuaaaaccaagauaccagaaagaagagugguagcucaagguccagaggaagaauuugguagaucacucaucaaacacaauucauguauuguaacaacacaaaaugguaaauuuacaggucuggguaucuaugauagaacgcuagucuuaccaacacaugcagauccagguaaugaaauacaaauagaugguaucacaacuaagguagaagauucuuacgaucuguucaauaaagaugggaucaaauuggaaaucacagugcucaaacucaagagaaaugaaaaguuuaaggauauuaggaaguauaucccagaaaaugaagaugauuauccagauugcaauuuggcuuuaucugcuaaucaaccagaaaccacaauaaucaauguuggggauguagugucauauggaaauauuuuacuuaguggaaaumaaacagcaagaaugcucaaauauaauuauccaacaaaaucagguuauugugguggaauuuuguacaaaauuggacaagucuuagggauucauguuggugguaauggaagggauggauuugcagccaugcuacuaagaucauauuuuucagaaacacaaggccaaauaguugucacuaaaccuacuauugagugcaauuuaccuaguauccacacacccaguaagacuaaguuacaaccuaguguauuuuaugauguuuucccugguaguaaagaaccagcuguacuuucagaacacgacucuagguuagaaguugauuucaaacaagcuuuauuuucuaaauauaaagguaauagucagugugaaauaaaugaucauguuaaaguggcaauuucucauuauucagcacaacuaaugacauuggauauugacccaaauccaaucucauuagaggauagcguuuuuggugcggaagguuuagaagcacuugaccuuacuaccagugcuggauuucccuauguguccauggguauuaagaagagagauuugauuaacaagcaaacaaaagacaucacaaaacuuaaaauggcacuagauaaguaugguguugacuugcccauggucacauuucuuaaagaugaacuuaggaaaaaagagaaaauugccacuggaaagacacgugucauugaagccagcaguguaaaugacacuauucuguuuagaacaacuuuugggaaucucuuuucaaaauuucaccuaaauccuggcauuguuacugguucugcaguagguugugacccagaaacuuuuuggucaaaaauaccaguaauguuaaauggcgagugcauaauggcauuugauuauacaaauuaugauggcagcauacauccaauuugguuugaagcucuuaaagaagugcuauccaauuuaggguuccagucugaucuaauagauagauuaugcaggucuaaacacauuuuuaaaaauguauauuaugagguagaagggggggugccaucagguuguucuggaacaagcauauuuaauacaaugauuaacaauauuaucauuaggacacuaguucuggaugcauauaagaacauugauuuagauaagcuuaagauaauagcuuauggagaugauguuaucuuuucuuauaaauaucaauuagacauggaagugauugcaaaggaaggcauuaaguauggacuuacaaucacuccagcugauaaaucaagugaauuuaagaaauuggauuauaauagugugacuuucuugaagagaggguuuaagcaagaugaaagguauucauuucugauacauccaauuuuuccaauugaugaaauucaugaguccauucgauggacuaagaaaccaucucagaugcaagaacacguucugucacugugucauuuaauguggcauaaugguagggauguguauaagcaguucgaacaaaagauacgcagugugagcgcuggucgcgcacuguauaucccaccguaugaucugcuuuugcaugaaugguaugaaaaauuuuaaguuguuuagauauagaaauaauaaacaauuaguuuuuuaguuuuau

SEQ ID NO: 23 - RNA, 7133 nt, Human rhinovirus
uuaaaacuggauccggguuguucccacccggaucucccacguggaguuguacacuauuauuacgguaauuuuguacgccaguuuuauaucccuuaccccaaguaacuuagaagauaaacacacagaccaauaggagguggucauccagaucacuaagggucaagcacuucuguuuccccggucaagguugauaugcuccaacagggcaaaaacagcugagaucauuauccgcaaagugccuacgcaaagccuaguaacuaccucgaaaguacuugacuggucgcuccgccauaccccaugguagaccuggcagaugaggcuagaaaucccccacuggugacaguguucuagccugcguggcugccugcacacccuuugggugugaagccaaguaauggacagggugugaagagucgagugugcucacuuugaguccuccggccccugaauguggcuaacccuaacccugcagcuagggcacacaauccaguguguaucuagucguaaugagcaauugcgggaugggaccaacuacuuuggguguccguguuucuuguuuuucauuuauaauugcuuauggugacaauauauaguauuauauauuggcgucaugggcgcucagguauccaggcaaaacguuggaacucacucuacacagaauucagucacaaaugggucuaguuuaaauuauuuuaacauaaacuacuucaaagaugcugcaucaaguggugcauccaaacuugaauuuucacaggacccaagcaaauuuacugauccgguuaaagauguucuugaaaagggaauaccuacuuuacaaucacccacuguugaagcguguggauauucugauagaauaauccaaaucacaagaggagauucaacaaucacuucacaagauguagcuaaugcaguuguugcuuauggaguuuggccccauuaccucaccccacaggacgcaacugccauugauaaaccuucucauccagacacuucaucaaauagguuuuacacucuugaaaguaaaaauugggauagugagucaaaagguuggugguggaaacugccugaugcauuaaaggauaugggggucuuuggccaaaauauguacuaccauuuccuuggcaggaguggguauacaguucaugugcagugcaacucaagcaaauuccaucaaggaacccuaauuguggcuaugauaccugaacaccaauuggcagcggcagagaggggaaaugucaccgcuggauacaauuucacacauccuggugaaauuggaagggauguuggaaaaacugaacgccaacauacaagcaagcaacccagugaugacaacuggcucaauuuugauggaacacuguuggguaauauuaccaucuuuccacaccaguuuauuaacuuaagaaguaauaacucagcaacaauaauagugccauauguuaaugcuguaccuauggauuccaugcuuagacauaauaacuggaguuuggugauuauaccuaucuguccacuacaaucugaaggaacuguaucaacuacuauuccaauuacuauuucuaucaguccuauguuugcugaguucucuggugcacgugcaaagagucaagguuuaccaguacuaaugacaccaggaucuggccaauucaugaccacugaugacuuucagucaccuagugcguuaccaugguuucacccuaccaaggagauauccauaccuggacagguuagaaauuuaauagaaaugugucagguggauaccaucauaccaauaaauaacacugguaauaacaccacaagcauuaauauguacacaguacggcuugaaaggcagacaaauuuaaugggugaaguuuuugccauaaacguggacauagccucucauccuuuagcaacuacauuauuaggggaaauugcugguuauuauacccauuggacaggcaguuuacguuuuagcuuuauguuuugugggucugcuaguacuaccuuaaagcuucuguuggcauacacuccaccaggaaucucaaaaccuacaaccaggaaggaagcaauguuggguacucaugugguuugggauguuggcuuacaaucaacuauuucuaugauaguaccuuggguuagcgcuagccauuuuagaaacacaacaccagauaaguacuccuuagcaggauucauuaccuguugguaucaaacaaaucuuguaguuccugcagauacaccagccacagccaacuuacuauguuuuguguccgcuugcaaagacuuuugcuugcgaauggcuagagauaccaacuugcacaaacaaagugguccaauaacccaaaauccuguggagaauuacauagaucaaguuuuaaaugaaguuuugguaguuccaaacaucaaagaaagcaaucccacaaccucuaauucagccccagccuuagaugcugccgaaacaggucauaccaguaauguucaaccugaagacaugauugaaacacguuaugugcaaacaacacacacuagagaugagaugagucuugagagcuucuuagggaggucaggauguguacauauauccaaauuagauauugauuauaccaauuacaauaaaaguguuaagaauuucacaauuuggaagauaaauauaaaagaaauggcccagauuaggagaaaauuugaguuguuuacauacacaagguuugauucugaaauaacauuaguaccuuguauagcugcagaaagugacagcauuggucauguuguuaugcaguacauguauguaccaccaggggcuccucuaccacaagcaagagaugacuacacauggcaaucuggcacgaaugcaucuaucuuuuggcagcauggacaggcauaucccagguuuucacuuccauuucuaaguauugccucugcauacuacauguuuuaugaugguuaugauggugggccagauucacaauauggaacaauuguaacaaaugauauggguucccuguguucucguauagucaccgaagagcacggaucccguguugauauuucaacuaggguauaucacaaagcuaaacacgucaaagcuuggugcccacgaccaccuagggcaguugaauauacacauacacauguuacaaauuacaaaccaagcacaggugauuacaccacagccauacaaaccagagagcauguuagagcagucaaaaauguagguccuagugacauguauguccauguagguaaucuuauauauagaaaccuucauuuauucaacucagaagcaagugauucaguguuaauaucacauucaucugauuuagucauauaccgcacaaacacaacaggugaugacuacauaccaacuugugacuguacagaugccacuuacuauugcagacacaagaauagauauuaccccauuaaggucacuagucaugauugguaugaaauacaagaaagugaauauuacccaaaacacauucaauauaacuuauuaauaggugaaggaccuugugagccuggugauugugguggaaaauuauugugcaagcaugguguaauagguauaauuacagcugguggugagggucauguugcauuuauagauuugagacauuuucacugugcugaagaacagggaauuacugacuauguacauaugcuaggugaagcuuuuggaaaugguuuuguagauaguguuagggaucaaguuaaugcaauaaauccuauaaauaguauaaguaagaaaauaauuaaauggaugcuuagaauaauaucagcuaugguuauuauaauuaggaauaguucugacccgcaaacaauaauugcuacauuaacucuaauaggauguucugguucaccguggcgauucuuaaaagaaaaauucugcaaauggacacaacuaaauuauguacacaaagaaucagauucuuggcuuaagaaauuuacugagaugugcaaugcugccagaggucuugaauggauagggaauaaaauauccaaauuuauugauuggaugaaaucaauguugccacaagcacaacuuaaaguuaaauauuugagugagcuaaagaaacuuaauuuauuagaaaaacagauugacaauuuacguugugcugauacaaaggugcaggaaaaaauaaaauuugaaauagauacacuucaugauuugucuugcaaguuucugccauuauaugcaagugaagcaaagagaauaaaaacauugcauaacaaaugcugcaauauaauaaagcaaaagaaaaggagugagccaguugccauuaugauacauggaccuccuggcacugguaaauccauaacaaccagcuuucuugccaggaugauaacaaaugaaagugauaucuacucacuuccaccggauccuaaauauuuugaugguuaugaucaacagaguguugucauaauggaugauaucaugcagaacccugguggugaagauaugucucuguuuugucaaaugguuuccaguguaacuuuuauaccuccaauggcagauuuaccugauaaaggaaaacccuuugauucaagauuuguuuuuugcagcaccaaucauucacuucuugccccuccuaccauuaccucacuuucugcaaugaauagaagguuuuauuuagauuuagauauuguaguaaaugaaaauuacaaagauacccaaggaaaauugwaugucccaaaaucuuuuaaaccgugugacauagauaauaagauuggaaaugcaaaauguugccccuuuauauguggaaaagcagucguguucaaggaucggaacacgugucaaacauauacacugugucaaaucuauaacaugaucauugaggaagacaaacgacgcagaagcguuguugauguuaugucugcaauuuuccaaggucccauaucuaugaauuccccaccuccaccugccauagcugauuuauuacaaucaguaagaacuccagagguuguuaaguauugugaauauaauaaguggauaauuccagcugaauguaaaauagagagagauuuaaaucuugcaaacaacauaauaacaauuauugcaaauaucauuaguauagcagguauuauauuuguuauuuauaaauuauuuugcucauugcaaggaccauauucaggugagccuaagccaaaaaccaagauuccugaaagaaggguaguagcacaaggaccugaggaagaauuuggacguucauuaauaaaacacaauacaugugugauuacaacagauaauggaaaauuuacuggauuggguauuuaugauaaauacaugaucauuccaacacaugcugauccgggcaagacuguccaaaucaaugguauuauuacaaauguuauugacucuuaugauuuacauaacaaagauggaguuaaacuugaaauuacagucauuaagcuagauagaaaugaaaaauucagagauauacgcaaguauauaccagagagggaagaugauuauccugauuguaauuuagcacuuguagcaaaucaaccugaaccaacuauuaucaauguaggugaugugauuucuuauggaaacauauuacuuaguggaaaccaaacagcuagaauguuaaaguaccauuacccaacuaaaucuggauauuguggugguguuuuauacaagauagguaguauaauaggaauucauguaggugguaaugguagagacggcuucucagcaaugcuacuuagaucauacuuuagugaaacacaaggucaaaucacuagcucaagaaauguuaaggaucuuggauacccgacuauacacaccccuaacaagacuaaacuacacccaagugucuuuuaugauguguucaagggcacuaaagaaccugcuguuuugucggagaaggauccacguuuagaaacugauuuuaaaacugcuuuauucucuaaauauaaagggaauguuaauugugaauugaaugaucauaugagaguugcuauagcgcacuacucagcucaauuaaugacccuugauauugauccaagcaacaugacaauggaagaaaguguguuuggaacugaugguuuggaagcauuagaccuaaauacaagugcaggguuuccauauauaaguauggggauuaaaaagagagaucuuaucaacaacaguacaaaggauauaucuaaacuuaaaauagcauuagauaaauauggaguggacuugccuaugguuaccuucuuaaaagaugagcuuaggaaaaaagaaaagaucccaucuggaaaaacuaggguuauagaggcuaguaguguuaaugacaccauagcauuuagaaugacauauggaaauuuguuugcauguuuccacaaaaacccuggaguuguaacugguucagcaguagggugugauccugaaacuuuuuggucaaaaauaccugugauguuagauggugauuguauaauggcauuugauuacacaaauuaugauggcaguauacacccugugugguuugaagcacugaaggaaaucuuaaaagacuuacaguuugaacauagguuaauagauagauuguguaacuccaaacauauauuuaaagauucuuauuaugaaguugagggaggggugccuucagguuguucaggaacuagcauauucaacacaaugauuaauaaugugauuauaagaaccuuaguccuagaugccuauaagcauauagaucuagauaaacuuaagauaauagcuuauggagaugauguuauuuucucuuacaaauacccuuuggaaauggaggcaauugcaauagaaggcaagaaauauggucuaacuauuaccccugcagacaaaucugauacuuucaagaaauuggauuaugauagugucacauucuuaaaaagaggauucaaacaagauuccaaauacccauucuugauacaucccacuuuuccaguaagugaaauucaugaaucaaucagauggacaaagaaaccaucccaaaugcaggaacauguucuuucauugugucacuuaauguggcauaauggacgugauguuuacaaagaguuugaacgugggauucgcagcguuagcgcuggacgugcguuguauaucccacccuaugaacuuuuacugcaugagugguaugagaaauuuuaacuuucauauauauagaaguagugaauacuuaguucauuaguuuuau

SEQ ID NO: 24 - RNA, 7133 nt, Human rhinovirus
uuaaaacuggaucuagguuguucccaccuagaucuccuacacggaguuguacucuguuauuccgguaacuuuguacgccaguuuuauacccccuucccccuuuguaacuuagaagcugaacauacugaccaauaggcggcauucaaccagaaugucaaaggucaagcacuucuguuuccccgguuaaagcugauaugcuccaacagggcaaaaacagccuuaaucguuauccgcaagacaacuacgcaaagccuaguaucaucuuugaaaguaugugguuggucgcuccgcuauaaacucaauagcagaccuggcagaugaggcuagaaacuccccacuggcgacaguguucuagccugcgcggcugccugcgugcccuauacggguacgaagccauauauuugacaaggugugaagagccccgugugcuugucuugaguccuccggccccugaauguggcuaaccuuaacccugcagcugguaugcacaauccaguacauggccagucguaaugagcaauugcgggaugggaccaacuacuuuggguguccguguuuccuauuuuaccuuuauauuugcuuauggugacaauauauauauaacauauauauuggcaucaugggcgcucaaguuucaagacagaauguugguacgcacuccacacagaaugcaguuucaaauggaucaagucugaacuauuucaauauaaauuauuuuaaggaugcugccuccagcggugcaucaaaacuugaauucucacaggauccaaguaaauuuacagacccagucaaggauguauuggaaaaaggaauccccacucuacaauccccuacuguagaagcauguggauauucagauagaaucauacaaaucacaagaggagauucuacaauaacaucacaagauguugcaaaugcuguuguugguuauggcguguggccucauuauuugacaccucaagaugcuacagcuauagacaaaccuucucgaccagauacuuccucuaauagauuuuacacuuuggcaaguaaggaaugggacuuuaauucuaaaggauggugguggaaguugccugaugcucuuaaggauaugggaauuuuuggugaaaacauguuuuaccauuuccuugguagaagugguuauacaguacaugugcaguguaaugcaagcaaguuucaccaagguacuuugauuguugccaugauaccugagcaucaauuggcaagugcaacaaccgggaaugccacagcuggguacaaccuuacgcauccuggagaggcagguagagaugucagcccaaagacucgugaaaauauugauaaacagcccagugaugaugcauggcucaauuuugauggcacacugcuagguaacauaacuguauauccacaucagcuuauuaacuuaagaagcaacaauucagccacaauuauuguuccuuaugugaaugcaguuccuauggauucaaugcuaagacacaacaacuggaguuugguuauaauaccaauuuguccacuagaaucuguaccagcuucaacuguaccuauuacuaucucuauaagcccuaugugugcugaguuuucuggugcccgcgcugcugcgagaaaccaaggcuuaccaguauuuauaacaccaggaucuggucaauuuaugacaacagaugauuuucaaucacccagugcucugcccugguuucaucccaccagagaaauuucaaucccaggucaaguuaaaaaccuuguugaacuuugccaaauagauacacugauucccauaaacagcacaacugcaaauaaugauaacacaaguauauacacugugacuuuggaaaaacagacuaauuuagcacaagaaguauuugcaauuaaaguugauauugcaucuaauccucuugccacuaccuuaauuggugaaauagcuaguuauuuuacucacuggacaggcagcguccgauuuaguuuucuuuucugugguacugcaaacacuacucuuaaauuguuguuagccuacacacccccuggaauacguaaaccuauuagcagaaaggaagcaaugcuugguacucauguggugugggacguuggucugcaaucaacaauguccaugguuguucccuggguuagugcuagucauuuuagaaauaccacaccagauacauauuccuuagcuggguaugugaccugcugguaccagaccagccuggugguaccaagcaguacaccaaucacugccaagauguuguguuuuguuucgggcuguaaagacuuuugucuaagaauggcacgagauacaaauuuacauuuacaaaguggcauuauaacacaaaauccaguagagaauuauauagaagagguguugaaugagguuuuaguagugccuaauaucagagagagucaagcaaccacaucaaauucagcaccugccuuagaugcagcugagacuggacacacuaauaauguacaaccagaagauaugauugaaacaagauauguacaaacaucacaaacucuugaugagaugaguguggaaagcuucuuaggaaggucugguugcauucacaugucaaaauuaguagugaaauaugaagacuauaaugagaaaaagaauuuuaugacauggaaaauaaaucuacaagagauggcacagauuaggaggaaauuugaaauguuuacauaugccagauuugauucagagaucacccuagucccuucuauagcugcccagggagaugauguuggucauguuguaaugcaguacauguaugucccaccaggugcaccagcuccagaaaagagagaugauuacacauggcaaucaggaacaaaugcaucugucuuuuggcaauauggacaaacauauccuagguucucauuaccuuuccuuagcauagcuucagcauauuacauguucuaugauggauaugauggggaccaacccaauuccagguaugguaauaugguuaccaaugacaugggcacuuuaugcucuagaauaguuacagauaaucauaagcauccaauagaaguuacaacaagaguauaccauaaagcaaaacaugucaaagucuggugcccaagaccaccuagagcuguggaauacacccauacucauguuacaaauuauaaaucaacaacucgugaagugaagacagcuauuagaccaagagcaacaaucaagacugcaggaccaagugacauguauguacauguugguaaucucauauauagaaauuugcaccuuuucaauucagacauucaugacuccauaucaguaucauacucaucagauuuagucauauaccgaacaaacacuacaggugaugacuacauaccaacuugugacuguacugaugcaacuuacuuuugcaagcacaaaaacagauauuauccaauaaaagucacuagucaugauugguaugaaauucaggaaagugaguauuacccaaaacacauacaguacaacuuauuaauaggugagggcccaugugaaccuggugauuguggugguaaacugcugugcaaacacggaguuauuggaauaauaacugcagguggugagggacauguggcauucauagauuuaagacauuuccauugugcugaagaacaggggauuaccgauuacauacacaugcuuggugaggcauuugguaguggguuuguugauagugucaaagaccaaauaaaugccauaaacccaauuaacaauauaaguaggaaaauuguaaaauggauucuaagaauaauaucagcaaugguugugauuauuagaaauucaucugauccccagacaauaauagccacauuaacuuuaauugguugcucuggaucaccauggagauuucuuaaagaaaaguucuguaaauggacacaacuaaauuacauccacaaagagucagauuccuggcuaaagaaauuuacugaaaugugcaaugcagcuagaggucuagaguggauugguaacaagauauccaaauuuauugaguggaugaaaucaaugcuaccacaggcacaacuuaaaaucaaauaccuuaaugaacucaagaaguugaaccuuuuagaaaagcaaauugagcacuugagaauagcugauucuaguacucaagagaaaauuaagugugagauagacacuuuacaugauuuaucaugcaaauuucuucccuuauaugcuagugaggcuaaaagaauuaaagucuuauauaauaaguguaauguaauuaucaaacagaagaagagaugugaaccgguggcagucgucauacauggggaaccuggagccggaaaaucuaugacaacaaacuuccuagcaagaaugauaacuaaugauagugacauauacucacucccaccagaucccaaauacuuugauggcuaugaucagcagagugugguuauaauggaugauaucaugcaaaacccaaguggugaugacaugacucuuuucugccagauggugucuagugucacauuuaucccaccuauggcugaucuuccagacaaaggcaaaccuuuugacuccagauuuguuuuguguaguacaaaucauaguauguuggcaccaccaacuaucacaucuuugccagcaaugaauaggagauucuaucuagauuuggauauuguaguuagugaaaaauacaaagaccagcaagggaagcuuaauguugcugccgcauuccaaccuugugaugucaaugcaaaaauuggcaaugcacgcuguuguccauucauauguggaaaggcaguaauguucaaggauagaaacacuugucaauccuacacauuggcacagguguacaaccauauacuugaagaggacagaaggcgcagacaaguuguagauguuaugucugcaauuuuccaaggaccaaucucuuuggaargaccaccaccagcugcaauaagugaucugcugcaaucaguaagaacuccagaagucaucaaguacugugaggacaacaaauggauaaucccugcuggguguagaauagaaagagauuuaaauauugccaacaccauaauuacaaucauagcaaauguaauuagcauuucugggauuauuuaugugauauacaagcuauuuuguacauuacaaggaccuuacucuggugaacccaaacaaaggacaaaaauuccugagaggagaguuguugcacaaggcccugaggaggaauuugggagaucacuaauuaagcacaacucauguguggucaccacgcaaaauggaaaguucacaggucuaggaauuuaugauagaacaaucauaauuccaacacaugcagacccagguaaagaaguucagauugauggcauuucuacaaaaguugaggauucuuaugacuuauacaauaaagaugguaucaaauuggaaauuacuguucucaaacuucaaagaaaugaaaaauuuagggauauuaggaaguacauaccugaaaaagaagaugacuacccugaaugcaaccuggcuuugucugccaaucaaccugagaccaccauaaucaguguuggagauguuguaucauauggaaauauucuacuuaguggcaaucaaacagcuaggaugcuuaaauacaauuauccaacaaaaucaggauauuguggugguauacuauauaaaauuggucaaguucuuggcauucauguuggugguaaugguagagauggauuugcagcaauguuguugagauccuacuuuucugagacacagggccagauuaccauuucaaaaccaguaguugaacuuggcuuaccuaguauccacacaccaagcaagacaaaauugcaaccuaguguuuuccaugauguuuuuccuggaaguaaagagccagcuguucucucugauaaugaucccagauuagaaguagauuucaaacaagcacuguuuucuaaguauaaagguaacaaugaaugugcaaugaaugaacauaucaaaguugccguuucccacuacucggcacaauuacacacacuagauguugacccuaggcccauaaccguagaagacagugucuuugguguagaaggcuuagaagcucuugaucuuaacacaagugcaggguaucccuauguaacuaugggcauuaaaaagaaagacuugauagacaaccgugccaaagacuugaccaaacuaaaaauagcaauggauaaauauggaguugauuuacccauggucacuuuccucaaggaugagcuuagaaagaaagaaaaaauuucugcuggaaaaacucgugucauugaagccaguaguguaaaugauacuguguuauuuagaucagucuauggcaaucuuuucucaaaauuucaucuaaacccugguaucaucaccgguucugcaguaggaugcgauccagagacuuuuuggucaaaaauaccuguaauguuagauggugaguguauaauggcuuuugacuacacaaauuaugaugguaguauacacccaguuugguuugaugcacuuaaguuaguccuggcaaaccuuucauuuagaacugauuugauagacagauuguguaagucaaagcacauauucaaaggcacauauuaugagguagaagguggggucccaucaggaugcucuggcacaaguauauuuaauacaaugauuaacaaugugauuauuagaacacuagugcuagaugcuuacaaaaacauugauuuggauaaacucaaaauuauugcuuauggagaugaugucauuuucucuuacaaauaucagcuugauauggaggcaauugcuuuggaggguguuaaguauggauuaacaauaaccccugcagauaaauccaguaucuucaagaagcuugauuauaguaacauaacuuuucuaaagagaggcuuuaggcaagaugagaagcauaauuuccuyauucacccaacuuuuccaauugaugaaauucaugagucaaucagguggaccaagaaaccaucucagaugcaggagcacguccugucauugugucauuugauguggcauaaugguagagauguguauacucaauuugaaaggaggauacguagugucagcgcuggucgugcacuauauauaccuccuuaugaccugcuucugcaugagugguaugaaaaauuuuaaacuguuuaaauauagaaauauuaaacauuuaguuuuuuaguuuuau

SEQ ID NO: 25 - RNA, 7119 nt, Human rhinovirus
uuaaaacuggguccagguuguucccaccuggacuucccacguggaguugugcacuguuauuccgguaacuuuacacgccaguuuuaucucccuucccaaayguaacuuagaagauguacacagcgaccaauagguggcaacuagccaaguugcuuaaggucaagcacuucugucuccccggucaauguugauacgcucucccagggcgaaaacaacugagaucguuauccgcaaggcgccuacacaaaaccuaguaacaucuugaaugguauguggcuggucguuccgcuaaaccccauaguagaccuggcagaugaggcuagaaauuccccacuggcgacaguguucuagccugcguggcugccugcguguccuuacggacacgaagccauauacuugacaaggugugaagagucccgugugcucgucuugaguccuccggccccugaauguggcuaaccuuaacccugcagccagugcgcacaaaccaguguguagcuggucguaaugaguaauugcgggaugggaccaacuacuuuggguguccguguuucacuuuuuaccuuuuauuaugcuuauggugacaauauauagaugcauauauugacaccaugggcgcacagguuucuagacagaauguugguacacacucaacucagaacacaguuucaaaugguucaaguuuaaauuauuuuaacaucaauuauuuuaaagaugcugcaucacacggugcuuccaaauuagauuuuucacaagauccaagcaaauuuaccgacccuguuaaagaugugcuugagaaaggcauuccuacacuccaauccccaaccguagaagcaugugguuauucagauaggauuauacagauaacaagaggggauuccacaaucacuucccaagauguagcaaaugcaguaguuggguacggaguguggccccacuauuuaacaccacaagaugcuacagcuauugacaaacccucgcggccagacaccucuucuaauagauuuuacacucuggagagcaaaaugugggacaguucaucaaagggauggugguggaaguuaccagaugcccucaaggacaugggaauuuuuggugaaaauauguauuaucauuucuuggggcgaagugguuacacuguacauguucaauguaaugccagcaaauuucaucaggguacacuuauuguagcaaugauaccagaacaccaacuggcaagugcaaccuaugggaauguugccgccggguauaauuacacacacccaggugaacguggcagagucaucaauguuacuacgcgugaacaaaaugauaaacaaccuagugaugacaauuggcuuaauuuugaugguacauuauuagguaauaucacaauuuacccacaucaacucauuaauuuaagaaguaauaauucagcuacaauuauugucccauauguuaaugcaguaccuauggauuccaugcuuagacacaauaacuggaguuuagugauaauacccauaugccaacuagagggaacuccaggcacugugccuauuaccauuuccaucagcccgaugugugcugaguucucaggggcuagagcaaaaaaccagggcuuaccaguuauguuaacaccuggcucuggacaauuuaugaccacugaugauuuccaauccccuugugcuuuaccuugguaccacccuaccaaagagauaucuaucccaggucaaguuaggaauuuaauugaauuaugucaaguggauacacuaauacccauaaauaauuuacaacaaaauaucagcaauacugauauguauucaguuguauuaaacaaugaaacagaacuagcaaaagagaucuuugcuaucaggguugauauugccucucagccucuggcuaccacccugcuuggcgaaauugcaaguuacuacacucauuggacugguagucuuagauuuaguuuuauguuuugugggucugcuaacaccacucuuaaacuuuuaauagcauacacaccaccagguauuagcaaaccaaccaagagaaaagaagccauguuaggaacacauguugucugggauguuggauuacaguccacuaugucaaugguagucccuugggugagugcuagucauuuuagaaacacaacuccugacaaauauuccuuagcuggauacauaacuuguugguaucaaacaaaucuuauagcaccacagaacacaccccaaacagccaagauacuaugcuuuguuucggcauguaaagauuuuugcuuaagaauggcaagagacacaaacuuacauaaacaaucuggaccuauagaacaaaauccaguugaaaauuacauagaugagguacuaaaugagguauugguuguaccaaacauuaaagaaagccaagccaccacaucaaacucugcccccgcacuggaugcagcugagacuggucacacuagcaguguacaaccugaagauaugauugagaccagguacguacaaacaucacaaacaagagaugaaaugagcauugagaguuuccuggguaggucuggcuguauacacauguccaaacuuguuguagauuaugaaaauuacaaugcaaaaacaaagaacuuuaugacauggcaaauuaauuuacaggaaauggcacagauuagaaggaaauuugaaauguucaccuacgucagauuugauucugaagucacccuaguaccaucaauagcggccaaaggugaugauauuggacauguugugaugcaauacauguauguaccaccaggugcaccaauaccuaaaacuagagaugauuuugcauggcaaucuggaacaaaugccucaauauuuuggcaacauggucaaacauacccuagauuuucccucccuuucuuaagcauagccucagcauacuacauguuuuaugauggauaugauggugaucaacaugauucaagauaugguacaguagugacuaaugacauggguacuuuaugcuccagaauuguaacugaugaacaccaaaacagaguagaaauaacaacuagaguuuaucacaaagcuaaacauguaaaaaccugguguccaagaccaccaagagcuguugaguacacacacacacauguuacuaacuacaaaguuagggguaaaacugagaagacugcaaucaaacacagagcaaagaucacaauggccgguccaagugauauguaugugcauguagggaaucuuauauauagaaaccuacaccuauucaacucagaaaugcaugauucuaucuugauuucuuacucuucugauuuagucauauaccgcacaaacacaauaggugaugacuauauuccaacaugugauuguacugaagccacauacuuuugcaaacauaaaaacagguauuucccaauuagaguuacaagucaugacugguaugaaauucaagaaagugaguacuauccaaagcauauacaauauaaccucuuaauuggagaagggccaugugaaccaggugauuguggagggaaacuauuauguaaacaugguguuauuggaauuguaacugcugguggugaggggcauguggcuuucauugaucucaggcauuuccauugugcugaagaacagggcauaaccgauuauguucauaugcuuggugaggcuuuuggcuuggguuuuguggacagugucaaggaccaaauaaaugcgauuaacccgauuaaugguauuaguaagaaaaucaucaaaugguuacugagaauaauaucagcaaugguaaucauaauuagaaauucaucugauccacaaacaauaauagccacauugacccuaauugguuguucaggaucaccauggagauuuuuaaaagagaaauucuguaaauggacccaacuuaauuauauucacaaagaaucagauucauggcuuaagaaguucacugaaaugugcaaugcagcuagagguuuggaguggauuggcaauaagauaucaaaauuuauugauuggaugaaaucuauguugccccaggcacaacuuaaagucaaauaccuuaaugaacuaaagaaauuaagcuuccuugaaaaacaaauggaacaucucagaguugcugauucucaaacucaagaaaaaauaaaaugugaaauugacacuuugcaugaucuauccuguaaauuccuuccacuuuacgcuagugaggcaaaaagaauaaagauuuugcauaauagauguaguacaaucaucaaacaaagaaagagaugugaaccaguggcuguuguuauacauggugaaccugguacuggaaaauccaugacuacaaacuuccuggcaagaaugauaacaaaugauagcgacaucuauuccuuaccacccgacccaaaauauuuugauggguaugaucaacaaaguguggucauuauggaugauaucaugcagaauccuaguggagaugacaugaccuuguuuugucaaaugguaucaagugugacuuucauaccaccuauggcagauuuaccagauaaagggaaaccauuugauucuagauuuguauugugcaguacuaaucauaauuuguuagcaccccccaccauaacgucuuuaccagcaaugaauagaagguuuuuccuugauuuagauauuguagugugugagaaauacaaggauucacaaggaaaacuaaauguuucugcugccuuccgaccaugugaugucaauacaaaaauuggcaaugcccgaugcuguccauucaucugugguaaagcagucaauuucagagaccgaaauacaugucagacauacacgcuuucacaaguguacaaccagaugcuugaagaggauaaaaggcguagacaagucauugaugucauggcagcaauauuucaaggaccuaucuccauggagggcccuccaccagcagcaauaagugaccuguugcaaucaguuagaacuccugaaguaauuaaauauugugaggwaaauaaauggaugauuccagcagaauguaaaguggaaagagauuuaaauauagcuaacacuaucaucacaaucauagcaaauauuauuaguaucucuggaauuauuuauguuauauauaaacuuuuuuguacauuacaagggccuuauucuggagaaccuaaacccaaaacaaaagugccagagagaagagugguugcacaaggaccugaggaggaauuugguagaucacucaucaaacauaauucaugugugguaacuacugaaaauggaaaauucacaggacugggcaucuaugacagaacauugauugugccaacacaugcagacccugguaaggagguacaaauagaugguauuacuacuaaaguggaagauuccuuugauuuguuuaauaaagauggugugaaacuggaaaucacugugcuaaaauuaaagagaaaugaaaaguucaaggacauuaggaaauauauaccagaacaugaagaugauuacccagacugcaaucuggcuuuaucugcuaaucagccagaaacuacuauaaucaaagugggugauguugugucguaugggaacaucuuauuaagugguaaccaaacagcuaggaugcuuaaguauaacuacccaacaaaaucaggauacugugguggcauauuauauaaaauuggacaaguccuuggaauccauguuggugguaauggaagagauggauuugcugcaauguuguuaagaucuuacuuuacugaagcacaaggucaaauaaucaccuccaaaagcacugcugaguguaauuuaccuagcauccacacaccaaguaaaacaaaauuacagccuagugucuucuaugauguguuuccagguaauaaggaaccagcuguucuuucagaccaugacccaagauuaaagguuaauuucagugaggcacuuuucucuaaauauaaagguaacaaucagugcaccauaaaugaucacauuaaaguggccaucucccauuacucggcacaauugaccacacuagauauagauccaaauccuauaacuuuagaagaaagugucuuuggcauagaggguuuagaggcacuugaccuuaauacuagugcuggauuuccuuaugugucaaugggcauaaagaaaagagauuuaauuaacaaacagaccaaggacauuucuaaauugaaauuggcauuagauaaauaugguguugauuuacccauggucacauuucuuaaagaugaacuuagaaagaaagagaagauuucugcggguaagacccgugugauagaagcuaguagugugaaugacacuguauuauuuagaacaaccuuuggcaaccucuucucuaaauuucaccuuaauccugggauuguuacugguucugcugugggcugcgauccagaaacauuuuggucaaaaauaccagugauguuagauggggacugcauuauggcauuugauuacacaaauuaugauggcaguauacauccaauuugguuucaagcauuaaaagagguauuaggcaauuugucauuugaagcuaauuuaauagauagguuauguaauuccaaacacaucuuuaagaauguauauuaugaaguugagggugggguuccaucaggguguucugguacaaguauauucaauacaaugauaaacaacauuauuauuaggacacuaguucuugaugcauacaaaaauauugauuuggauaaacugaaaauaauagcuuauggagaugauguuauuuuuucauacaaguaccaacuugacauggaagcaauugcuauggagggcaccaaauauggauuaacaauaaccccugcugacaagucggacaaauuuaaacagcuugauuauagcaaugugaccuuucuuaaaagaggauuuaagcaagaugaaaaacacaauuuccuaauacauccaacuuucccaauugaagaaauucaagaaucuauucguuggacaaagaaaccaucucaaaugcaagaacauguucugucauugugucauuuaauguggcauaaugguagggauguguacaagcaguuugaggagcgaauacguaguguaagcgcuggucgugcacuauauaucccuccuuaugaucugcuuuugcaugagugguaugaaaaauuuuagauuauuuagauauaaaaguauuaaauaauuaguuuuuuaguuuuau

SEQ ID NO: 26 - RNA, 7224 nt, Human rhinovirus
uuaaaacagcggauggguucccuaccauccgacccacuggguguaguacucugguacucuguaccuuuguacgccuguuuauccacuacccuuuuccuaaauuuuccacccguguaaccuuagaagcaaacaaauuguacaauagggugcaucacaaccagugauguacaguacaagcacuucuguuuccccggagcgggguauagacggucaccacugucaaaagcccuuaaccguuacccgccaaccaacuacguaacggcuaguaacaccaugaauuugucuugacguucgaucaggugguaaccccccacuaguuuggucgaugaggcugagaacuccccacggguaaccgugucucagccugcguggcggccaacccagcuucugcugggacgccaauucauugacauggugugaagaccugcaugugcuugguugugauuccuccggccccugaaugcggcuaacccuaaccccggagccacgcggcauaauccaaugucguaugggucguaaugaguaauucugggaugggaccgacuacuuuggguguccguguuuccuguuuuuccaaauuauucuuauggucacagcauauaaauagauauauacugugaucaugggagcucaagugucuacacaaaagagugggucgcaugagaaucaaaacauucuuaccaaugggucucaccaaacuuucacuguuauuaauuacuauaaggaugcagcaaguucuucaucagcuagccaauccuuuucaauggauccaucaaaguucacugaaccaguuaaagauuugauguugaaaggugcuccggcauugaacucaccuaaugucgaggcguguggauacagugauaggguacaacaaauaacuuugggcaauucaacaauaacgacacaagaagccgccaaugcugugguauguuacgcugaauggccagaguauuuaucagaugaugaugcuagugaugucaauaaaacuucuaaaccagacacuucaguauguagguuuuacacuuuagauaguaaaacguggcaacaagauucaaaggguugguguuggaaacuaccagaugcacucaaagauauggguguauuuggacaaaauauguuuuaccacacacuuggcagaacuggcuacacuauucaugugcaauguaaugcaacaaaauuccacaguggguguuuauugrucguugucauuccagaacaucagcuggcaucacaugauggugguacuguaucagucaaauauaaauuuacccacccaggugaucaagguauagaccucaguacagcagaagagacaaacggcccuguaaagaacccgguauacaauauggauggaacauuacuagguaaucugcucauauuuccccaucaguuuauuaaccuuagaacaaauaauacagcuacaauaauagucccauauaugaacucagugccaauggauucaaugacacgucacaauaaugugucauuaaugguuauucccaucgcaccauuagcagcaccaacagguuccgcuacaacauuaccaaucacagugaccauagccccaauguuuacugaauuuacuggaauuagauccaagacuaucguuccaaaugcuaccccucagggauugccaacgacaacccugccagguucgggacaguuucucaccacugaugauaggcaaucccccagugcacuaccaaauuaugaacccacacccaaaauacacauuccaggagaagucaaaaacuuauuagaaauaauucagguugacaccuuaauuccaaugaauaauacccacacuaaagaugaaguuaagagcuaccucauaccacugguugcaaaccaacaaaaucagaaaaucuuuggaacagacuuguauauuggagauggcguuuucaagacuacacuuuuaggagagauugcucaguacuacacacacuggucagggucucuuaagauuucauuaauguauacggguccugcuuuauccagugcaaaauugauucuagcuuacacuccaccuggagcaccuggaccggaaaccagaaaggaugcuaugcuuggcacacauguugugugggauauaggccuacaaucaacaauagucaugacuauuccauggaccucgggagugcaauucagauacacggacaaggacacuuacacuagugcaggcuuucugucguguugguaucaaacaucucuaauacucccaccacaaacacaaggucagguguauuuauugucuuuuaucagugcauguucagauuuuaaauuaagacugaugaaggacacacaaaccauaucacaaacagaugcauuaccagagggcuugggagaagagcuugaggaagucauugucgagaaaacgaaacagacaguggcuucaauugcuucuggaucuaaacacacccaaaguguaccaacgcuaacagcaaaugaaacaggagcuagcaugcccgugragccaucagauaguguugagacuagauuaaccuauaugcauuucaaagguucagaaacagauguggaaaguuucuuggguagagcagcaugugugcauaugacagagauaguaaauaaaaacccagcarguaguacaaaucaaaaacaagacaaacuauuuaaugauuggagaauaaacuugucuagucuuguacaguuuaggaaaaaacuugaacuuuuuacuuaugucagauuugauucagaauauacuaucuuggcuacugcaucacaaccagauaacucaaaguauuccagcaacuugacuguacaggcuauguaugucccuccuggugcuccuaacccugaagcauggaaugauuacaccuggcaaagugccucaaacccuaguguauuuuucaaaguuggugauacauccagauuuagcguccccuuuguagguuuggcaucagcauauaauugcuucuaugaugguuauucucaugaugaugagaauaccccuuauggcauuacaguauuaaaucacauggguagcauggccuuuaggauaguuaaugaucaugauguucauacaacuuuaguaaagauuaggguuuaccacagagcaaaacauguccaagcauggaucccaagggcaccaagagcacuaccauaugugucaauuggacguucaaauuaugacaaaagugccaaaccaguuauuaagaggagagaacagaucacaaaauauggcuuggguccaagauuuggagguguauuuaccaguaauuucaaaauaaugaauuaucacuugaugacuccagaagaucacuugaauuuaauagcaccauaccaaaguagagaccuagccauuguagcaacaggugcucauggugcagaaaccauaccacauugcaacuguaccuccggaguuuacuacuccaccuauuacagaaaauuuuauccuguuauaugugagaaacccacaacaaucuggauugaagguggaccuuauuauccaagcagguaccaaguuggugucaugaaaggaguaggaccagcagaaccaggugacuguggugguauuuuaagauguauucaugguccaauagguuuacuuacagcaggugguggaggcuaugucugcuuugcagacaucagacaguuggagaauguugcagaagagcaggguuugggugacuacauaaccagucuaggcagggcuuuuggugugggauucacagaccaaauaucagcuaaaguaguagaauuacaggauguugcaaaagauuuccucacaacaaagguacucuccaaaguaguuaagaugauaucagcauuaguuauaaucuguagaaaucaugaugauuuagucacggucacugccacuuuggcucuguugggcugugaugguuccccuuggagauucuugaagauguauauuucuaagcacuuucaagugccauacauugagagacaagcaaaugauggcugguuuagaaaauucaaugaugcaugcaaugcggcaaaaggucuagaauggauugcaaacaaaauuucaaaauugauugaauggauaaaaaacaagguuuuaccucaggcuagagaaaaauuagaguucugcaguaagcugaagcaguuagauauacuagaaagacagauaaccacaaugcacauuuccaauccuacgcaggaaaagagagaacaacuguuuaacaaugugaugugguuggagcagaugucacaaaaauuugccccucucuaugcuacagaggcaaaaagaaucagagacuuaaagaacaaaauaguuaauuacaugcaauucagaaauaaacaaagaacugaaccaguauguguucuaauacacgguacacccgguucuggaaaaucucugacuacaucaauuguagggcgcgcauuggcugaacauuucaacucagcaguauauucacugccuccagauccaaaacacuuugauggguaccaacaacaggaaguugugauuauggaugaucuaaaccaaaacccagauggucaagacaucaguauguuuugucaaaugguuuccucaguugacuuucucccuccaauggcuaguuuagauaacaagggaauguuauuuaccaguaauuuuguuuuagcaucuacaaauucaaauacuuuaaguccaccaacaaucuugaauccagaagcacuagccagaagauuuggguuugaucuagauaucugcuugcauaguacauauacaaagaaugggaaacuuaauguaacaauggcaacuaguauuuguaaagauugucaccaaccuuccaauuucaaaaaguguugcccguuaguuugugguaaagcuauaagcuugguggauagaacaucaaauguuagauauaguguagaccaauuaguuacagccauuaucaaugacuacagaaauaagguuaaaauuacagauucacuagagguccuauuccagggaccaguguacaaggaccuggaaauagauguguguaacacaccaccaccagaguguauuaaugauuuacucaaaucaguugauucugaagagguuagggauuacuguaaaaagaaaaacuggauuauuccccagauccccacuaauaucgagagggcugugaaccaggcuagcaugauaauuaauacaauacugauguuuguuaguacuuuagguauaguguaugucauuuacaaauuauuugcacaaacccaagguccauauucagguaacccaacacauaacaaauuaaagccaccaacacuacgaccaguaguggcacaaggucccaacacagaguuugcacuguccuuacucaggaagaauauuguaaccaucacaacagagaaaggagaguucacuggauugggaauauaugaucaaauuuguguuauucccacacaugcccaaccaggugauaguguguuaguuaauggacagaaaauacaggucagagacaaauauaagcuuguagauccagagaauguaaauuuagaacucaccauucugauccuugauaggaaugaaaaguuuagagacauuagaaacuuuauaucugaggauguggagggguuagaagcuacacugguaauucauucaaaccacuucaccaauacaaucuuagauguagggccaauaaccauggcagguuuaauuaacuugaguaguacacccaccaauaggaugauucgcuacgauuaucccaccaaaacgggccaguguggugguguguuguguacaacugguaagaucuuuggaauacauguggguggcaauggaagacaggguuucucugcacaacucagaaggcaguacuuuguuuccaaacaaggacaaauaguggcaagacaaaaacuaaaggaucuuaauuuaaugccagucaacacuccuaccaaaacaaagauacacccaaguguauucuaugacguguuuccaggcaguaaagaaccugcaguccucagugauaaugaucccagacuugaaguuaaacuaucagaaucuuuauucucuaaguauaagggaaauguugaaaugaaaccuacagauaauauguugguggcuguggaucacuaugcuggacaauuaaugucauuagacauuccaacuacugaguugacauugaaagaagcauuauaugguguugauggccuagaaccuauagauguaacaacuagugcagguuaccccuauguuaguuuaggcauaaagaagagagacauuuugaacagagaaacccaggaaguugaaaagaugaaauuuuacuuggacaaauauggaauagacuuaccacuaguuacuuauauaaaggaugaguuaagaaguguggacaagguacgauugggaaagagcagguuaauugaagccuccaguuugaaugauucaguuaacaugagaaugaaauuagguaacuuauauaaagccuuucacaaaaacccugguacuauaacggguucagcaguugggugugauccugacacuuucugguccguuauaccauguuugauggauggacaccugauggcuuucgauuauucaaauuuugaugcuucauuauccccaguaugguuuaccugucuagagagaguacucuugaaauuaggauuugaacacucaaauuugauucagaccauaugcaauacccaucacauauucaaagaugaaauuuacacaguuaaagguggaaugccuucugguuguucugggaccagcauuuucaauucuaugauuaacaauauaauuauuagaacauuaauauuggaugcauacaaaggcauagauuuggacaaacucaaagucauugcguauggugaugacuuaauaguaucuuaccccuuugaauuagauccagggguguuggcaucacaugggaaaaacuauggauugacuaucaccccuccagauaaaucugaaaaauuugagaaaaugacuugggaaaaucuaacauuuuugaagagauauuuuaaaccagaugagcaauuuccauuccuuguccauccaguaaugccaaugcaagacauauaugaguccaucagauggacuaaggaccccaaaaacacacaagaucaugugagaucccuauguauguuagcauggcauucaggacagaaggaauaugaacacuucauugaaaggauaagaucagugaacaucggaagauguuugaaucugccugaauacagcgugcugagaaagcgcugguuagacauguucuaaucugguuaraacaaugauauagacauuuaauuuguguagaauuagaaguuuau

SEQ ID NO: 27 - RNA, 7136 nt, Human rhinovirus
uuaaaacuggaucuggguuguucccacucagaucucccaugcggaguuguacucuauuauuccgguaaucuuguacgccaguuuuuacacccuccccccuuguaacuuagaagaaaguacauaacgaccaauagguggcaauuaaccaaauugucaacggucaagcacuucuguuuccccggucaagauugauacgcuccaacagggcgaaaacaauugagaucguuauccgcaaagugcccacgcaaagccuaguaacacuuugaaaggucuaugguuggucguucagcuaaaccccauaguagaccuggcagaugaggcuagaaauuccccacuggcgacaguguucuagccugcguggcugccugcacacccucacgggugugaagccauauacucgacaaggugugaagagccccgugugcucacuuugaguccuccggccccugaauguggcuaaccuuaaccccgcagcuagugcauacaaaccaguauguggcuagucguaaugagcaauugugggaugggaccaacuacuuuggguguccguguuucacuuuuuuccuuuuguuugcuuauggugacaauauauauaguauauauugacaccaugggcgcgcagguuucuagacagaauguugggacacacuccacgcaaaacucuguuucaaauggauccaguuuaaauuacuuuaacauaaauuacuucaaagaugcagcaucaagcggugcaucaaaauuggaauucucacaagauccaaguaaauuuacugauccagucaaggauguccuggaaaaaggaauccccacgcuacaaucaccaacaguugaagcauguggauauucugauagaauaauacaaauuacuagaggagauucaacuauuacaucacaggauguggcuaaugcaguuguuggauaugggguguggccacauuaucuaacuucacgagaugccaccgcuauagauaagccuucacaaccagacacaucuuccaauagguuuuacacucuagaaagcaaaacauggacaagugauuccaagggguggugguggaagcuaccugaugcccuuaaggagaugggagucuuuggccaaaacauguauuaccauuuccuuggaaggaguggcuauacaguccaugugcagugcaacucuaguaaauuucaucagggcacacuaauuguagcaaugauaccagaacaccaauuggcugcagcugaaaaaggaaauguaacugcugguuacaaucuuacacacccaggugagacgggcagggaugucgguauaacuguucgugaacauccaaacaaacaaccuagugaugauaacuggcuuaauuuugaugguacauuguugggaaauauaaccauuuuuccgcaucaauuuauuaauuugaggagcaauaauucagccacaauaauagucccuuauguaaaugcagugccuauggauucuaugcuuagacacaauaauuggaguuuagugauaauacccauuuguccauuagagguuaguaguccuggaaguaauagcaucccaaucacugugucuauaaguccaauguuugcugaauuuucuggugcacgugccagaagucaaggucugccaacaaugaugacaccugggucaggacaauuuaugaccacagaugauuuccaaucuccuugugcuuuaccaugguuccacccaacuaaagagauuucuauaccuggugaggucaaaaaucuaauugaauugugccaaguugacacaaugauuccuauaaauaauguuggaaauaauacuaagaguguggauauguauacaguaguauuacaaagacaggaucaacuaaugcaagaaguuuuugcuauuagaguugauguggcaucacaaccuuuagcaacaacacuaauuggagaaauuucaaguuauuauacucaguggacugguagcuuacgcuucaguuucauguuuuguggaacggccaacacaacucucaaacuuuuaauagcauacacaccaccagguauaguuaaacccagaaauaggaaggaagcaaugcuaggaacacacauugucugggaugugggucuacagucuacaauuucuaugauuguaccauggguuagugcuagucacuuuagaaauaccacaccugacacauacucauuagcuggguuuauaacauguugguaucagaccaaucuuguagucccuccagacacuccagccacagccagaaugcuauguuuuguaucagguugcaaagauuuuugucuacguauggcuagagacacaaacuuacacaaacaaucuggagcuauaacccaaaacccaguagaggaauacauagauggagucuugaaugagguucuugugguuccgaacauuaaggaaagccacuccagcacaucaaauucagcaccagcauuagaugcugcugagacuggacacaccaguaaugugcagccugaggauaugauugaaacucgcuauguacagacaucacaaacuagagaugaaaugaguguagaaaguuuucuaggaagaucagguuguguacauauauccaaucuugacauagauuacauuaauuacaacucugaagacaaaaacuuuacaacauggcaaaucaaucucaaagaaauggcucaaaucagaagaaaguuugaaauguuuacauaugugagauuugauucagaaguuacauuagucccauguauagcagcacaaaaugaagguguggggcauguuguuaugcaguauauguaugucccuccaggggcaccauuacccaggaagagagaugauuacacuuggcaaucugguacaaaugccucuguuuucuggcaauauggucagacauauccucgauuuuccuuaccuuucuuaagcauugcaucugucuauuauauguuuuaugauggauaugauggggacucaacagaaucacauuaugggacagcggugaccaaugauauggggacacuuuguucaagaauagucacugaaaaucaugggacccaagugaagauaacaacuagaauuuaucauaaggcaaaacauguaaaagccugguguccaagacccccaagggcaguugaauauagacauacacauguuaacaauuacaaaccagaccaaggggaaguaaccacuaugauuccaacuagaaccaacauaagaaccaucguaaauguuggucccagugacauguaugugcauguagggaauuuaaucuacagaaacuuacauuuauuuaacucagagguuagugauucuguuuuaguuucauauucaucagacuuagucauuuaccgaacaaacacaacaggugaugacuauaucccaacuugugacuguacugaugcaacauacuauuguaaacauaaaaauagauacuucccaauaaaaguuacuagccaugauugguaugaaauacaagaaagugaauauuauccaaagcacauucaguauaaucuguuaauuggugaagggccaugugaaccuggggauugugguggcaagcugcugugcaaacauggugugaucggcaucaucacagcugguggugagggucauguggcauuuauagaucuacgccacuuccauugugcagaagagcagggcaucacagacuacauacacauguuaggugaggcauuugguaauggguuuguagauaguguuaaagaacaggugaaugcuauuaauccaauaaauaauguuaguaagaaaauaaucaaauggaugcucagaauuauaucagcaaugguaauaauaauuagaaacuccucugauccacaaacgaucauagcuacacucacucuaauuggauguucugggucaccuuggcgauuccuuaaggagaaauuuuguaaauggacucaauuaaauuauauucauaaggaaucagauucauggcucaaaaaauuuaccgaaaugugcaaugcagcuaggggucuugaauggauugguaacaaaauuucuaaauuuauugauuggaugaaaucuauguuaccucaagcacaacuuaagguuaaauaucuuagugaauugaagaaauugaauuuacuggaaaagcagauugacaauuuacgcugugcagauucaaaaguucaagagaagauuaaauuagagauugacacccuucaugaucuaucuuguaaauuucuucccuuauaugcuagugaagccaaaagaauuaaaguauuauuuaacaaguguaauaccauaauuaaacaaaagaagagaagugaaccagucgccauuauggugcacgguccaccagggaccgguaaguccauaacaacuaguuuccuugcuagaaugauaacuaaugaaagugaugucuacucacuaccuccggauccuaaauauuuugauggcuaugaucaacaaaguguugucauaauggaugauaucaugcaaaauccagacggugaggacaugucauuguuuugucaaaugguauccaguguuacauucauaccgccaauggcugaucuaccugauaaaggcaaaccauuugauucaagauuuguuuuuugcagcacaaaccaaucucuucuagcuccaccaaccaucacgucacucucagcaaugaauagaagauuuuuccuggaucuagacaucacaguucaugauaacuacaaggauaaucaagggaaauugaauguuccaaaaucauuuaaaccaugugauguggauaauaaaauagguaacgcaaaguguugcccauucauauguggaaaagcugucucauucaaagaucgaaacacaugccaaacuuacucacucagccagauuuauaacauggucauugaagaggauaaacggcggagaaauguggucgaugucaugucagcaaucuuccagggcccuauuucaaugaaugcuccaccaccuccagcaauagaagauuuguugcaaucagucagaacuccagaagucauaaaauauugugaggaaaauaaauggauaauuccagcagauugcaaaauugagcgugauuuaaaccuugcaaauaauauaauaacaaucauagcaaauauuauuaguauagcaggcauuauauuugugauuuauaaauuauuuugcucacuccaggguccauauucuggugaaccuaaaccuaagacuagaacuccagaaagaagaguggucgcacaaggaccagaggaagaauuuggccgaucacucauuaaacacaacucuugcauuguaacuacacaaaacgguaaauuuacaggguuaggaauauaugauaggacauuaauaauaccaacacaugcagauccaggaaaugagguccaaauugauggaaucaccacuaaaguagaagacucuuaugauuuguuuaauaaagauggagucaaauuggaaaucacuguacuuaaauugaagagaaaugaaaaauucaaagauauuaggaaguacauaccagaaaaugaggaugauuacccugauuguaauuuggcccucuccgccaaucaaccugaaacuacuauaauuaauguuggagauguuauaucauaugguaauauuuuacucaguggaaaucagacagccagaaugcucaaauacaauuacccaacaaaaucaggcuauuguggugguauuuuguacaagauuggacaggucuuggguauacauguuggugguaaugggagagauggauuugcagccauguuacucaggucauacuucacagaagugcaaggucagauaaccacuaccaagucuacuagugaguguaauuuaccuaguauucacacgccaagcaaaacuaaauuacaaccuaguguguuccaugaugucuuuccagggaguaaagagccagcuguacucucagagcaugacccuagauuaaagguuaauuucaaagaagcuauauuuucuaaguacaaaggaaauaaccagugugaaaugaaugaccacauuagaguagcaauuucacauuacucagcacaauuggcaacacuggauauugauccaaauccaaucucccuagaagauagugucuuuggcauagaaggucuagaagcacuugaccuuaacacuagugcuggauuuccuuauguuuccauggguguuaagaaaagagauuugauuaacaaacaaaccaaagauguaacaagauuaaaagcagcaauggacaaauaugguguugacuuaccuaugguuacauuucuuaaagaugagcuuaggaaacaggagaagauuucugcuggaaagacacgugucauagaggcuaguagugugaaugacacugugauguuuagaacaacuuuuggaaaucuuuuuucaaaauuucauuuaaacccuggaauugugacuggcucugcuguggguugugauccagagacguucuggucaaagauaccagugauguuagauggugaaugcauaauggcauucgauuacacaaauuaugaugguaguauacacccuauaugguuccaggcucucaaggaaguacuauccaaucuggguuuucaaccuaauuuaauagauagauuauguaaaucaaaacauaucuuuaaaaauacauacuaugagguugagggaggaguaccaucaggcugcucugggacaagcauauuuaauacaaugaucaauaauguaauaauuagaacauuagucuuggaugcuuacaaaaacauugauuuggacaaauugaaaauaauagcauauggagaugaugucauauucucauacaaauaucaauuagauauggaagcaauagccaaugaaggugugaaguauggucuuacaauaacuccugcugacaaaucaagugaguucaagcaauuggauuauagcaauguaacuuuuuuaaaaagaggauuuaaacaagaugacagauaccaauuucugauacauccaacuuuuccaauugaugagauacaagaauccauaagguggacaaagaaaccaucucaaaugcaggagcauguucugucauugugucaccuaauguggcauaaugguaaggauguguacaagcaguuugaaaggaagauacgcagugucagcgcuggucgcgcacuguauaucccucccuaugaagugcuucugcaugagugguaugaaaaauuuuaaauuguuuagauauaaaaguaauaaacaauuaguuuuuuaguuuuau

SEQ ID NO: 28 - RNA, 7138 nt, Human rhinovirus
uuaaaacuggauccagguuguucccaccuggauuuccuacauggaguuguacucuguuauuccgguaaccuuguacgccaguuuuauauccccccccauuguaacuuagaaguuaugcauacagaccaauagguggugauccuccagaucacuaacggucaagcacuucuguuuccccgguuugaauugauacgcuccaacagggcgaaaacaguuuaaaucguuauccgcaaagugccuacgcaaagccuaguagcacuuuagaaaaucuaugguuggucguucagcuauacccccuaguggaccuggcagaugaggcuagaaguaccccacuggcgacaguguucuagccugcguggcugccugcacacccuuaugggugugaagccauauauuugacaaggugugaagagccccgugugcucacuuugaguccuccggccccugaauguggcuaaccuuaacccugcagcuagugcauguaauccaacauguugcuagucguaaugagcaauugcgggaugggaccaacuacuuuggguguccguguuucacuuuuuccuuuuaauuugcuuauggugacaauauauauauaacauauauauuggcaucaugggcgcacagguuucuagacagaauguuggaacgcacuccacucaaaauucaguuucuaaugggucuaguuuaaacuacuuuaacaucaauuauuucaaagaugcugcaucaaguggggcaucaaagcuugaauucucacaagauccaagcaaauuuacugauccaguuaaagauguucuagaaaaaggaauaccgacuuugcaaucuccaacaguagaggcuugugguuauucagacaggauuauacaaaucacuagaggugauucgaccauaacaucucaagauguggcaaaugcuguaguuggguauggaguauggccccauuauuugacaccacaggaugcuacagcgauugacaaaccuagccagccugauacaucaucaaauagauuuuauacccuagagaguaaagaauggacuaauucuucccagggauggugguggaaauugccugaugcauuaaaagauauggggauauuuggagagaauauguucuaucacuuucuugguagaucagguuacacaguacauguacaguguaaugcaagcaaauuucaucagggcacuuuguuaauaguuaugauuccugaacaccaguuagcuagugcaacuacaggcaauguuacagcagguuauaauuacacacacccaggagaacuugguagaacugugggucagagaagaucugaagugaauaucaaacaacccagugaugacaauugguuaaauuuugaugggaccuuucuuggcaaucuauugaucuucccacaccaauuuaucaacuugagaagcaauaauucggcaacaaucauuguuccguaugucaaugcaguaccaauggacucaaugcuuagacacaacaacuggagucuauugauuaucccaaucaguccucucaagagugauaugucagcuacaucuaaaguccccauaacaauaucaauaaguccaaugugcgcugaauuuucuggugcaagggcaagacccagcgcaaccacgcaggguuuaccaguauauuugacaccagguucaaaucaauucaugacuacagaugauuuccaauccccaugugcuuuaccuugguaccauccaacuaaggaaauuuuuauaccuggagagguuaaaaaucuuauugaaaugugucaaguggauacucuaauaccaauaaacaacaccaugccaaaucuacgaaacaucaauaaauauacugugcaauuaacaagccaaauggauuuagcucaagaaauuuuugcacuuaaaguagauguagcuucucaaccuuuaucuaguacacucuugggagaaauauguucauacuacacacauuggacugguaguuuacgcuuugguuuuauguucugugguacugcuaauacaacucuuaaacuuuugauugcuuauacaccaccuggaauaaagaagccggagaauagaaaacaagccaugcuugguacacacauaguaugggauguaggauugcaaucaacaauaucuuuaguaguaccuugggugagugcuagucauuuuagauauacaacaccagacacauacacugcugcuggguauauaacauguugguaccaaacaaauuuuguauuuccaccaaacacaccugccacagcugacauguuaugcuuuguuucugcuuguaaagauuuuugccugcgcauggcuagagacacugauaugcaugugcaaaaugugccaaucacccagaaccccguugaaagguauguugaugagguucuuaaugaaguucugguaguuccaaauaucagagagagccauccaacuacaucaaauucggccccugccuuggaugcagcagagacuggacauacaagcaacauacaaccugaagauacaauagaaacaagauuugugcagacaucacaaacuagagaugaaaugagcauagagaguuucuugggaagaucugggugcauucauauauccacaauuacaguggauaacaguuuggaauaugaugaccaccacuuugauaaguggcagauaaccauacaagagaugucacaaauuaggagaaaauuugaauucuuuacauaugcuagguuugauucagaaauuaccuuaguuccuuguauagccgguaagggugaagacauuggacacauugugaugcaauauauguauguacccccuggcgcacccauaccaaagaaaagaaaugauuacacauggcagucaggcacuaaugcuucuguauucuggcaacauggucaaacuuucccuagauuuucuuuaccuuuccuaagcauagcuucagcauacuacauguuuuaugauggauacgauggugauacaucgaccucaagauauggcacaucagucacuaaccauaugggaacgcuaugcucaagaauagucaccaacaagcagcagcaugaaguugagauuaccacacguauauaucacaaggccaagcauauuaaagcaugguguccaagggccccaagagcaguaccuuacacacauacacacucaacaaauuauaaaccucaagaaggugaaguccagauuuuccucaaagagagagccagccuaacaacaguuggaccuagugauauguaugugcauguugggaaucuaauauauaggaacuuacaucuuuuuaacucugaaaugcaugauucaauuuugguaucacauucuucugacuuagucauauaccgcacaaacacaauaggugaugacuacauucccacaugugauugcacagaggcuaccuacuacuguaagcauaaaaacagauauuacccaauuaaaguaacaagucaugacugguaugaaauucaggagagugaauauuacccaaagcacauacaauacaaucuuuugauuggagaagggccaugugaaccaggugauuguggagggaaauuguuauguaaacauggcgugauuggcauaauuacugcugguggggaagggcauguugcuuucauugaccuuagacauuuccauugugcugaagaacagggcauaacugauuacauccauaugcucggugaagcuuuuggcacagguuuuguugauagcgucaaagaccagauaagugcuauuaauccaauuaacaacauuaguaagaaaguaaucaaguggcuucuuagaaucauaucagcuauggugauaaucauaagaaauucaucugauccucaaacaauaauagcuacgcuaacuuuaauugguuguucagguuccccuuggagauuucucaaagaaaaauuuuguaaauggacugaauuaacauauauccauaaagagucugacucauggcuuaagaaauuuacagaaaugugcaaugcugcaagggguuuagaauggauuggcaauaaaauaucuaaauuuauugacuggaugaagucuauguuaccucaagcccaacuuaagguuaaauaccuaagugaauugaagaaauugaguuuccuugagaagcaaauggagcaucuaagaguggcugauucccagacacaagaaaagauaaaacaugaaauugacacucuucaugaucuuucaugcaaguuucucccacuuuaugcaagugaagcaaaaagaaucaaaguucuacacaauaaaugcagugcaauuauuaaacaaaagaaaagaugugaaccuguugcuguuguuauucauggugagccugguacuggcaaaucaaugaccacaaacuucuuagcuaggaugauaacaagugauagugacauuuacucuuugccuccagauccuaaguauuuugauggauaugaucagcaaaguguagucauuauggaugauguuaugcagaauccaaguggggaugacaugacuuuauuuugucaaaugguuucuaguguuacuuucauaccaccuauggcugaucuaccagauaaaggaaaacccuuugauucuagauuuguauuauguaguacaaaccacaacuuacuagcaccacccacaauaaccucucuuccagccaugaauagaagauuuuuccuugaucuggacauuauagugugugauaaauauaagguugcacaaggaaaguugaauguaucugcugcauuuaaaccaugugauguuaacacaaaaauuggaaaugccaaauguuguccauucauaugugguaaagcugucauuuuuagggaucguaauacaugccaaacauacacucuagcacaaguauauaacuugauacuugaugaagacaagagacguaggcagguuauugauguaauggcagcaauauuucaagggcccauuucucuugaaggaccaccaccagcagcaauaagugaucuuuugcaaucagucagaacuccugaagugauuaaauacugugaagauaauaaauggauaauaccagcuggguguaagguagaaagagauuuaaacauugcaaauacuauuaucacaauuauugcaaacaucaucaguauuucuggaauuaucuauguuauauauaaacuuuuuugcacacuucaaggcccauauucgggugaaccuaaaccaaagacaaaaauaccggagagaagagugguggcccaagguccagaggaagaauuugguagaucacucaucaaacauaacucuugugugguaacuaccuccaaugguaaauuuacaggauuaggcauuuaugauagaacauugauuauaccaacacaugcugacccagguaaagaggugcaaauagauggcaucacaacugaaguacaagauuccuaugaucuguacaacaaagaugggauaaaauuggaaaucacaguucuuaaacuuaaaaggaaugagaaauuuaaggauauuagaaaguauauuccagaaaaugaagaugacuacccagauugcaauuuggcuuuaucugcuaaccaaccagaaacuacaauaauuaauguuggugauguagugucauaugguaauauucugcuuaguggaagucaaacagcaagaaugcucaaauacaauuauccaacaaaaucgggguacugugguggaauuuuauacaaaauaggccaaguccugggcauucaugucggugguaauggaagagaugguuuugcagcaauguuguuaagaucuuauuuuacagaaacacaaggucagauaauuacuuccaaauccacuauugaaugcaauuugccuaguauccacacaccaagcaaaaccaaauuacaacccagugucuucuaugaugucuuuccugguaacaaagaaccagcagugcuuucagagcaugauccuagauuaaaaguugauuuuaaagaagcccuguuuucaaaguacaaaggaaauaacccaugugaagugaaugaucacauuaaaguagcaaucucucacuacucagcacaauuaaugacauuggauauugauucaaauccuauuucauuagaagauaguguuuuugguauagaaggauuagaagcacuugaucuuaacaccagugcagguuuuccuuauguuuccauggguaucaagaagagagauuugauuaauaaacaaacaaaggauauuacaaaauuaaaagcagcacuagauaaauaugguguugacuugcccaugguuacauuccuuaaagaugaacuuaggaaaaaagagaaaaucuccgcuggaaagacacgaguuauagaggcuaguagugugaaugauacuguauuauuuagagcaacuuuuggaaaucucuuuucaaaauuucaucugaacccuggaauugugacuggaucugcuguggguugugauccagagacauucuggucaaagauaccaguaaugcuggauggugaguguauaauggcauuugauuacacaaauuaugaugguagcauacacccaauaugguuucaagcucuuaaagcaguguuauccaaucuaggguuuaauucuaaucuaauagauagacuauguagaucuaagcauaucuucaaaaauguguauuaugaaguugaaggaggagugccaucaggguguucagguacaaguauauucaauacaaugaucaacaauauuauaauuaggacauuaguuuuagaugcauauaagaauauugauuuggauaagcuuaaaauaauagcauauggagaugauguuauauucucauacaaauaccaauuggauauggaagcaauagcuaaagaagguucuaaauauggucuuaccauaacucccgcagauaagucaaaugaauucaagcagcugaauuauaacaauguaacuuucuugaaaagaggauuuaagcaggaugacaaguaccaguuuuuaauacacccaacuuuuccaauugaugagauacaugaguccauaagauggacaaagaaaccaucucagaugcaggaacauguucuaucacugugccaucuaauguggcauaaugguaaggauguauacaaacaguuugagcagagaauacgcaguguuagcgcuggucgugcacuguauauuccuccauaugaacugcuccugcacgaaugguaugaaaaauuuuaaauuguuuagauauagaaauaauaaauaauuaguuuuuuaguuuuau

SEQ ID NO: 29 - RNA, 7223 nt, Human rhinovirus
uuaaaacagcggguggguaucccaccacccgacccacugggugugguacacugguacuuuguaccuuuguaugccuguuugcauccccuucccuuuaccuaacaucccuccccaaguuauauuuugcgguaacguuagaagaagugaacyuagugcaacaggaaguaucaccaccagugauauaacgcacaagcaauucuuguuccccggagcuggauauagacugcuaacgugguugaaaguccuuaaccguuauccgccaguuaacugcgaaaagacuaguaacaucaugcacauuucuagguguucgaucaggugaaaaccccauucacuaguuuggucgaugaggcugagaguaccccacaggcgacugugucucagccugcguggcggccaacccgacuuaugucgggacgccuauuaauagacauggugugaagauccuauugcgcuuagcugugaguccuccggccccugaaugcggcuaaccuuaaccccggagucuugugauguaagccaacauuugcaaggucguaaugaguaauucugggaugggaccgacuacuuuggguguccguguuuccuuuauucuuaucauuuguguuucaugguuacaagcauuguuuguaaucaugggugcacaggugucaacacaaaagagugguucacaugaaaaucaaaacauacuuacaaauggaucaaaucagacauuuacaguuauaaauuauuacaaggaugcagcuaguucauccucugcaggacaaucacuuucaauggacccgagcaaguuuacugaaccaguuaaagauaucauguuaaaaggagcaccagcacuaaauucaccaaacauagaggcauguggauauagugacagaguugaacaaauaacauuagggaauucuacgauuacuacacaggaggcagcaaacucaaucguagccuauggagaauggccaucauuuuuaucagauguugaugcuagugauguuaacaaaacuacuaaaccagacacuucagcauguagguuuuacacuuuggauaguaaaacauggagucagaguucaaaggguuggugcuggaaacuaccagaugcgcucaaagauaugggcauauuuggucaaaauauguuuuuccacucucaaggcagaaccggguauacuauucauguucaauguaaugcaaccaaauuucacagugguugucuauuaguuguagugauaccugaacaccaacuugcaucaauugaaggugguaaugucucaguucuguaugacaagacacauccaggagagaaaggcauagaccuuaaugaugaagauccaaaaggcccaaugaaagauccucucuacaugauggauggcacacuaauuggaaacagucucauuuucccacaccaguuuauuaauuugagaacuaauaauacagcaacaauugugguuccuuacauuaacucaguaccuauggacuccaugacuagacauaacaaccucucucuguuagucauccccauugugcaaaucgcagcaacaacuggugcagcccccuccauaccaguaacuguaacuauugcuccaauguuuuuagaguuaucuggcauacgaucaaaagcuguuauacaaggacugcccacaguuuuaacaccagguucagagcaguuuuugacuacagaugauaggcaaucaccuagugcuaugcccaauuaugaaccaacaccauuaauacacauuccuggagaaguuaaaaaccuauuggaaauugcacaaguugauacuuugauuccaauaaauaacacagagacugccaguggauuggauauguacagaguuccacucacacaaaacaaacagggagaacagguauuuggguuuaaacucuacuuaggugaugguguuuuaaaaacaacacuaauaggugaguugugucaguauuuuacacauugggcagguucacugcgccuauccuuuauguacacuggcccagcacucucuagugccaaauuauuaauugccuacacacccccaggagcccaagguccaaucaaacgcaaagaagcaaugcuagguacacauguaauuugggacauuggacugcaaucaacaguagucuugaauauaccuuggacuucaggaguacaauuuagauauacagauccagacacauacacuagcgcaggguucauuucuuguugguaucaaacuuccuuaguguuacccccacaaacacaacaaacuguauauauacuagguuucauuagugcauguccugauuucaaacuuagacucaugaaagauacacagucaauacaucaagaaacagcauugacugagggguuggaagaugaauugauggaagucauuguugacaaaacgcagcaaacacuggcuucagucaagaguggaucuaagcauacccaaaaaguaccuucacuuacugcuaaugaaaccggagcaacgcugccaacaacaccauccgacagcguggaaacccggacaacuaugaugcacuauacagggucagaaacaacacuggaaaauuuucuggguagagcagcauguguacauguuguugaaaucagaaauaaacgacccacagauggugaagaacacaaaacacagcucuuguuuaaugauuggaaaauaaauuuguccagcuuaguacaacuuagaagaaaacuugaaauguuuacguauguuagauuugauucagaauauacuauaauagcuaccaguucacaaccuaaugaugcuaaauuuucuaguaaccugacuguucaagcaauguuuaucccaccaggugcacccaaccccaguaaaugggaugacuauacauggcaaagugcaacuaaucccaguguauucuuuaauguaggaaaaucagccagauuuaguguaccuuauuuaggaauagcuucugcuuacaacuguuucuaugacgguuacucucaugauaaccuaacuacaccauauggaauaaaugugcuaaaccacauggguucaauggcuuuuagaguaguuaaugagcaugauauucacaccacccaugucaaaaucagaguuuaucauagagcuaaacacauuagagcauggauacccagagcuccuagaguuuuagaguaccuacacauugguagaacaaacuacaaacaaaaucccaaaaaucccauuaagacuagggauucuaucaguacauauggguugggacccagauuugguggagugugcacugguaauauuaaaauaaugaacuaucaccugaugucucaugaggacacucuuaaccuugucacaccucuaccugaaagggaccuugccaucgugagcacgggugcucacgguucagagaccgucccacaauguaauuguaugucaggaguuuauuacucaagguacuauaacaaauuuuaccccguaauuugugaaaaaccaacauguuuauggauugaagguaacaauuacuauccaagcagauaccaacaggggguaaugagaggugucggcccagcugaaccaggugauuguggagguaucuugaggugcauacauggacccauuggacuuuuaacugcagguggaaguggcuauguuugcuuugcugauaucagagcauuggacauguucaaagcugaauaccaaggaauuucagacuacaucucgaauuuaggaaaagccuuugggacuggauucacugaacauaucagugaaaaaguaacagaauugcaaaauaugucacuggguuacuuaaauacuaagguuuuaucuaaaauaguaaaaauuguuucagcuuuaguuauaauuuguaggaaucaugaugauuugaucacuguuacagccacacuagcauuauuaggaugugauggaucaccauggagauacuuaaaaauguauauaaguaaacacuuuugcuuaccuuauauagaaagacaguccaaugauuuaugguuuaagaaguuuaaugacauguguaaugcagcaaaagggcuagaauggauugcaaacaaaaucuccaaacuuauagauugggucaaacagaaaaucuugccacaggcaagggacaaguuagauuuuuguagaaggcuuaaacagcuagauauuuuagaaagacaaauagauucauugcacaugaaccagguuaaugauaaugauagagaggucuuauuuaauaauauauuauggcuggaacaaaugucccagaaauuugcaccauuguaugccguugaggcaaagagaaucaaaaugcuuaagaauaaaaugacuaauuuuauacaguucaggucaaaacaucgcacagaaccagugugugugcuaauacaugguucaccuggcucagguaaaucauuaaccaccucuuugauuggcagagcuauugcggacaguugugguuccucuguguacucacuacccccagacccaaaacacuuugaugguuaucagcagcaagcuguagucauacuugaugaccuaaaucaaaauccaaauggugaagauauuaguacuuucugucaaaugguuucaucaguugauuuuauucccccaauggcaaaccuggacaauaaagguauguuguucaccagcaacuuuguauuggcauccacaaauucccaaacacuaaacccaccaacaguucuuaaucccgaagcucuagcacguagauuuggauuugacuuggauauguguuugcauaccacauacacaaaaucaggaaaauugaaugccgcauuagcaucagaauuguguaaagauugucacaaaccaacaaacuucaagagaugcugcccucugauuuguggcaaagccuuaagcuugguugacagacguacaaauguuagguucagcauagaccaguuagucacugcaauuauaacugaacaugcaaauaaaaccaaaauuuccaguucgcuggagguguuauuccaaggaccaacauacaaggacuugcacauagaugugacaacuacaccaccuccagaaugcauaguagaccuacuuaaaucuguggauaaugaggaggucagacaauacugucaagaaaaaagauggcuuauaccugaaauuccaacuaauguagagagagcagugaaccaggccacaaacuuaaucaauacaauucuaauguuuauaaccacacuugguauaauuuacaugauauacaagcuuuuugcucagacacaaggacccuauucaggacuugauaauaaauccaagcucaagcccccuacacuuagagcaguugugacacaaggacccaauacagaguuugcuuuauccuugcuuagaaagaauauaguaacagucacuacugacaaaggagaguuuacaggauugggaauacaugaaaggauauuaguaauaccaacccaugcacagcccucagaaaaaguucuuaucaauggauuugcuacuaacguuaaagauaaauggaaauugguggauccagacaauuuaaauuuggaaaucacuguccuagaauuagacaggaaugaaaaauuuagggacauuagaauguucauugcagaugacccagagugcaaugaagcaucacuuguuauacauucaaauaacuucaaggacacuaucuugacgguuggugcgaccacacuagccgguauaauaaauuuaagcaacacacccacugcgcgaaugauucgcuaugauuucccuaccagaacaggacagugugguggaguccuaugcucaacaggcaagauauaugguauucauguagguggcaauggaaaacaaggauucucagcucaacuuaaaaaacaguacuuuguacaaaaacagggucaaaucauuacaaaaagaaauguuagggaacuaaguaucaaacccauuaacacuccaaauacaaccaaacuucaucccaguguuuucuauaauguguucccuggaaguaaagaaccagcaguucuacauccugcagaugaacgacuugaagucaauuuugaggaaucccuauucucaaaauauaaaggcaaugugaagauggagaucacagagaacaugaagguggccauugaccacuaugcuggccaacuccuaucacuugauauacccacacaagaacuuacccugaaagaggcccucuaugguacagauggauuagaacccauagacuugaacacuagugcaggauacccauauguuaguuugggcaucaaaaagagaucuauuuuaaauaaggagaccaaagacacaacaaaaauggaagagugccuaaguaaauaugguauugaccugccacugguuaccuauauaaaagaugaacucagaggcaaagauaaaauuaggcuaggaaagaguagauuaauugaggcauccagucuaaaugauucaguuaacaugagaaucaaauuggguaacuuauauaaagcuuuucacaaaaauccuggaauacuaaccgguucugccguugguugugauccagacaccuuuuggucaguuauaccuuguuuguuggauggagaguuaauugcuuuugauuauucaaacuuugaugcuagucuuucaccaguuugguuugaguguuuagagcaaguguuaaagaagauaggauuucaauguucagaauuaauucaacaaauauguaccacccaucauaucuuuaaagaucagauuuaugugguagaaggugguaugcccuccgggugcucuggaacuagcaucuuuaauucaaugauuaacaacauaauaaucaggacucuaauauuagauguuuauaaagguauagaacuggauuccuugagaauaauagcauauggugaugauguuauuguuucauaucccuuuccuuuggacccggaaaagauugcacagcaaggagucauauaugguuuaaccaucacaccaccagacaagucaccuaaguuuacaaaaauggacuggaauacuguaacuuucuuaaaaagacaguuuaaaccagauaaggaauuuccauuucucauacacccaguaaugccaaugucagauauucaugaaucuauuagauggacaaaagacccuaaaaacacucaagaccacauuagaucauugugcaugauggccuggcacucaggagaggaugaauacaacaaguuuguggauggaaucaggaguacugauauugggaaagcauugcugauaccaucuuacucuguccucagacgcagauggcuugauuuguuuuaaaauuucuuucuuuagauauauagaguauaaauuuaguguagugaauuuuuccucuau

SEQ ID NO: 30 - RNA, 7129 nt, Human rhinovirus
uuaaaacuggguccagguugcucccaccuggaucacucacugaguguuguauacuguuauuacgguaacuuuauacgccaguuuuaucuccccuuaccccaauguaacuuagaaguuuguacauaccgaccaauagugagcaaucauccagauuguuuaaggucaagcacuucuguuaccccggucagcguugauaugcuccaacagggcaaaaacaacaaugaucguuauccacaagaugccuacacagagccuaguaacauucuagaaaaauucugguuggucgcucaauugcaaacccagcaauagaccuggcagaugaggcuggacauuccccacuggcgacagugguccagccugcguggcugccugcacacuccuuuggagugugaagccauaauuuggacagggugcgaagagccgcgugugcucaucuugaguccuccggccccugaaugcggcuaaccuuaaaccugcagccauuguuugcaauccagcagauruauggucguaaugagcaauugcgggaugggaccgacuacuuuggguguccguguuuccuuuauuuccauuuauaugcuuauggugacaauauaugauauauauugacaccaugggcgcucaagugucuagacaaaauguuggcacacacucaacacagaauacggucucaaauggaucaagcuugaauuauuucaacaucaauuauuuuaaagaugcggcaucuagcggugccucuaaauuagaguucucacaggauccuaguaaguuuacugacccagucaaggauguuuuggaaaagggaauaccaacuuuacaaucuccaacuguagaagcaugugguuauucagauagaauuauucaaauaacuagaggagauucaacaaucacaucccaagauguugcaaacgcaguaguggcuuaugggguguggccacacuauuugacaccacaggaugcaacugcuauugacaaaccaucacaaccagaaacuucaucagauagauuuuacacuuuggagaguaggucaugggauucuacaucaaaggguuggugguggaaauugccugaugcacugaaggacaugggcauauucggacagaauauguauuaucacuuucuugguaggagugguuauacagugcaugugcaauguaacgcuagcaaguuccaucaggguacucugauuguggcaaugauuccagagcaucaguuggcuagugcaacacaugguaauguuacagcuggauauaauuucaccaacccuggggaagcuggaagaaauguuggacaaauuagaaaugaacrccuuacuaaacaaccaagugaugauaauugguuaaauuuugauggcacgcugcuuggcaacauuacuaucuuuccucaucaguuuaucaauuugagaagcaauaauucagccacuauaauugucccauaugugaaugcuguuccuauggauuccaugcuuaggcauaacaauuggaguuuaguuauuauuccuauaugugaauugcaaguagagggggguguuccacgcacugugccaauaacuauaucaauaaguccaauguaugcugaguucucaggugcuagagcaaaaagucagggcauaccuaccauguuaacaccuggcucugggcaguuuaugacaacugaugacuuucaaucaccaagugcauuaccuugguaccacccuacaaaagaaauauccaucccaggucagguuagaaacuugauagagaugugcgagguugauacccuaauaccuauaaacaauguaggcacaaauguuaaaaauguuaauauguauacagugcuucuagagagacaagacaaccuagcacaggaaauuuuugcaauuagaguagauauugcuucucaaccccuugcuacuacacugauaggagaaauugccaguuauuacacacacuggacugguagucuucgauuuaguuucauguucuguggaucugcuagcacaacacuuaaacucuuauuagcauacacaccaccaggaauagcaaagccuacuacaaggaaggaugccauguuaggcacgcauguagugugggaugugggucuacagucuacaauuucuaugauuguuccauggauuagugcuagucauuucagaaacacaacuccagacgcuuacucauuagcaggauauaucacuuguugguaccaaacaaauuugguuguuccacccaauacaccaucaacugcuaaaaugcuuugcuuuguaucggguugcaaggauuuuuguuuaagaauggcaagggauacaaaucuacauaaacagaguggugccauuguacaaaauccuguugaaaauuauguugaugaaauuuuaaaucaaguucuuguagucccaaacacuguagaaagucauucaacaacauccaaugcagccccugcacuugaugcagcugaaacugggcauacuagccaggugcaaccugaagacaugguagagacaaggucaguacauaauuuccaaaccagagaugaaaugaguauugaaaguuucuugggcagaucugguugcauacauauuucaacacuugaaguaaauuaugaugauuauaaugggacaggcaaaaauuuuacccaauggccaaucaacuugcaagaaauggcacaaauuagaagaaaguaugaauuguucacauacuuaagguuugauucugaaauuacccuuguuccuugcauugcagcaaaaagcaaugauauaggccaugugguaaugcaguacauguauguaccaccaggugcgccaauuccaaaaacuaggaaagauuaugcauggcaaucuggcacaaaugcaucuguuuucuggcaacauggucaaacauuuccaagauuuuccuuaccuuuucugagcauagcaucagcauauuacauguuuuaugauggauaugaaggugaccaaaaaacaucccguuauggcacaauugcaagcaaccacaugggaacauuauguucuaggauaguuacagaagaacaccaaaaucaaaucgagauaacuaccaggauauaucauaaagccaagcauaucaaagcuuggugcccaagaccacccagagcuguugaauacacacacacacaugucacaaauuauaaaagagaaggaaaggagguagaaacagccauaguaucuaggagggauaucaaaauugucaaugcaggcccaacagacauguaugugcaugugggaaauuugauauauagaaauuuacaucucuuuaauucagaaaugcaugagucuguauuagucucuuacuccucugacuuagucauauaccgaacaaacacuguaggugaugacuauauuccaacaugugauugcacagaugccacauauuacugcaaacacaaaaauagauacuacccaaucaaagugaccagucaugauugguaugagauacaagaaagugaauauuaucccaagcauauacaguacaauuuauuaauaggugagggcccaugugaaccaggugauuguggugguaaauuguuguguaagcacgguguaauagguaucauaacugcagguggagagggucauguugcauucauagaccuuagacauuuucacugugcugaagaacagggcauaacagauuacauccauuuacuuggggaagcuuuuggcaauggauuuguugaaaguguuaaggaacagguaaaugcaauaaauccaauuaauaauaucagcaaaaagauggucaaauggaugcucagaauaauuucagcaaugguuauuauuauuagaaauaguucugacccacaaacaaucauugcuacuuuaacauuaauuggcugcucuggaucaccauggcgcuucuuaaaagaaaaauuuugcaaauggacucagcuuaauuacauccauaaagaaucagacucuugguuaaagaaguuuacugaaauguguaaugcagccagagguuuagaauggauugguaacaaaauuucaaaauuuauagaguggaugaaguccauguuaccccaagcucaacuuaaaguuaaauaccuugcugagcucaagaaguuaaacuuguuggagaagcaaauugaaaauuugaggggagcugauacaaauacacaggagaagauaaaacuugagauugauacacugcaugauuuaucauguaaauuucuaccucuguaugcaagugaagcaaaaaggauaaaaguuuuacauaacaaauguaacaauauaauuaagcagagaaagagaagugaaccaguagccauaaugauacauggacccccggguacuggcaagucaaucacuacaaguuuccuagcuagaaugauaacaaaugaaagugauguauacucucuacccccugacccaaaauauuuugauggguaugaucaacagaguguggucauaauggaugauaucaugcaaaauccugauggagaggauaugucauuauucugucaaaugguauccagugugacauuuauacccccaauggcugauuuaccugauaaagguaaacccuuugacucgagguuuguauucugcaguacaaaucaaacucuguuagcaccgccuacuauaacauccuuaccagcuaugaauaggcguuucuucuuagaucuagauauaguaguccaugauaauuacaaggaugcccaagauaagcuuaauguuccaaaagcauucaaaccaugugauguagacaauaaaauaggaaaugcuaggugcugcccauucauauguggaaaagcugucucauucaaagaucgaaacacaugucaaagcuaugcuuuaugucagauuuauaacaaaguguuggaggaagacaaacgccgcaggaaugugguugaugucaugucugcgauauuucaaggaccuaucacauuggaugcaccacccccuccugcaaucacugauuuguuacguucugucagaaccccagagguuauuaaauacugugaggacaacaaauggaugauaccagcagguuguaagauagaaagagaucugaaccuggcuaacaauaucaucaccauaauagcuaauauaauaaguauagcaggcauaauuuuuguaauauacaaacucuuuuguucacuacaaggaccauacucaggugagccuaaaccuaaaacuaaggugccagaaagaaggauaguagcacaagguccagaggaagaauuuggacguucucuuaucaaacauaauacauguguugucacaacugauaauggaaaguuuacagguuuagguauauaugauaaauuaaugauuuuaccuacacaugcugacccugggaaagaaauuuauauaaaugggauaaaaguuaaaguuagugauucauaugauuuauauaauaaagauggugugaaauuggaaaucacuguagucaaguuagauagaaaugagaaauuuagggauauuaggagauauauuccagagaaagaagaugauuacccugaauguaauuuagcucuuguggcaaaucaaccagaaccaaccauaauaaauguaggggauguaguaucauaugguaauauuuuauugaguggaaaucaaacagcaagaaugcucaaguauaacuacccaacaaaaucaggauauuguggugguguuuuauacaagauaggaaauguuuugggaauucauguaggugggaauggcagagaugguuuuuccgcuaugcuauuaagaucauacuuuaaugagacccaagggaaaaucaucacagaaaaaagugucagagaguauggauuuccuaccauacauaccccaaguaaaacaaaguugcaacccagugucuucuuugacguguuugaugguagcaaagagccagcuguguuaucagauaaagacccacgccuugaaacugauuuuaaaacagcauuauucuccaaguacaaggguaauaaagaaugugaaaugaaugaccauauaaaaguugcuguugcucacuacucagcucaauuaaugacauuagauauugaccacagcaacaugucucuaggagauagugucuuugguauagaaggucuugaagcacuagacuugaauacaagugcaggguuuccuuauauuaguaugggaauuaaaaagagggauuugauaaacaaaaacacuagagacauuuccaagcuuaaagcagcauuagauaaauauggaguagaucuaccaaugguaaccuuuuuaaaagaugaacucagaaagaaagagaagauuucagcuggaaaaacucgugugauugaagcuaguaguguuaaugauacaguagccuuuagaaugauuuauggcaacuuauuugcugcuuuucauaaaaacccuggaauagugacaggcucugcaguagggugugauccagaaacuuucuggucaaaaauaccuguaauguuagauggugaauguauuauggccuuugauuauacaaacuaugacgguagcauacauccuguuugguuucaagcccuuaaaucuguacuugagaauuuacaauuugaacccaaacuaguagauagauuaugcaauucuaaacacauuuauagagauucuuauuaugagguggaaggagggguuccaucaggguguucuggaacuagcauauucaauacaaugauuaauaauguaauuauuagaacuuugguuuuggaugccuauaaacacauagaucuagauaaauugaagauaauagccuauggggaugauguuauauucuccuauaaguauacauuagacauggaggcuauugcaaaugaggguauaaaauauggauuaacaauuacaccugcagauaaaucugaaacauuuaccaaacuugauuauaauaacgucaccuuucuuaagcgggguuucaaacaggauguaaaauauccuuuucuuauacacccaacuuuuccaguacaagagauucaugaaucaauuagauggacaaagaaaccaucacaaaugcaggagcauguacugucacugugccacuuaauguggcacaauggacaagaugucuacaaggaauuugagcggagaauucguaguguaagcgcuggucgugcacuauauauuccucccuaugaaaugcuucugcaugagugguaugaaaaauuuuaaagauauagaaauaacaaauauuuaguuuguuaguuuuau

SEQ ID NO: 31 - RNA, 7114 nt, Human rhinovirus
uuaaaacugggucgugguuguucccaccacgacuaucuacggauguagugcucuuguauuccgguacgcuugcacgccaguuuugucaccccccccuacauuguaacuuagaagauuaacacaaagaccaauaggcggcaaugaaccacauugucaacggucaagcacuucuguuuccccggucaaucuagauaugcuuuaccaaaggcaaaaacuggagcgaucguuauccgcaaggugccuacgggaaacccaguagcauucuuuauuugaucugguugguugcucagccguuaaacccaaacgguaaaccuggcagaugaggcuggaagauccccaccagcgaugguguuccagccugcguggcugccugcacacccgaaagggugugaagccuuuucaaagacagggugcgaagagucuacugugcucaccuugauuccuccggccccugaauguggcuaauccuaaccccguagcuguggugugcaauccagcacauucgcagucguaauggguaacugcgggauggaaccaacuacuuuggguguccguguuucucuuuuuccuuuuauauaugcuuauggugacaauuauacggauauaguugucaucaugggcgcucaagucucaaggcagaauguugguacccacucuacacaaaacacaguuacaggaggauccagucuuaauuauuuuaauauuaauuacuucaaagaugcugcuucaucuggagcgucaagguuggacuuuucucaagacccaaguaaauuuacagacccagucaaagauguuuuaaccaaggguaucccaacccuacagucaccuacaguagaagcuuguggguauucagauagaauaauacaaauuaccagaggagacacaacaauaacaucccaggacauugcaaacgcuguaguuggauauggaguuuggccuacuuauuuagauucaaaggaugccucagcuauagauaagcccacacaaccagauacuucugcaaauagguuuuacacacuggaaaguaaggaauggacuccagauaguaaaggauggugguggaaauuaccagaugcacucaaagauauggguguuuuuggugaaaacauguucuaccaugcacuugguaggucugguuaccuaauucauguucagugcaaugcaaguaaauuucauucagggacccuucuuguuguugcuaucccagagcaccaguuggcauauauaggcacaggaaauguaacaguaggauacaaacacacccauccuggagagacuggaagagucauagcaacaaccacagacaaacagacaagacagccaucguuugacaguuggcucaauuguaaugguacccuuuuaggcaaugccuuaauauuuccacaucaauuuaucaauuugagaacaaacaaugcugccaccuugauccugccguacguaaaugcaacucccauggauuccauguuaagacauaauaauuggucauuacuaauagugccuguaucagaacuaagaggugacaccaguauaccaauuacuguaucaaucucucccauggcagcugaauuuucuggagcacggaaccgcagugcacguguggaagguuuaccagugauguuaacaccaggaucaggacaauucuugacaacugaugacaugcaaucaccaucaguuuuaccuuacuuccacucaacacaagaaaucuucauaccaggagaaguuaaaaaucuuauugaauugugccaaguggacaccaugguaccauuaaacaacuugcacauaaauaaaaacaagauuggaauguaugcucuaccacuuacacgacagaauacaccagcugcugaacucuuugcaaugccagucgacauuacaucuucaccuuuagcaaccacgcuuuuaggagagauugcuucuuauuacaccaacuggacagguaguauaagauugaguuucauguuuuguggcagugcaaacaccucacucaagcuucuucuagcauauacuccaccuggagugaguaaaccaaccaguaggagagaagcuaugcugggcacccaucuuguaugggauguaggucuucaauccacauguucuuuagucaucccguggauaucagcaucacauuuucggaauaccacgccagacaccuacucaaaagcugguuaugugacaugcugguaucagacaaauuucaucacagcaccaaacacaccaccuacagcugacauuauuugucugguuucagcauguaaggauuuuugcuuacgcauggcuagagauacuaaccagcacacucagcuuggagcaauagagcaaaacccuguugaacaauuugcagaagcaguccuugaucaaguauuaguaguuccaaacacucgacccagcgauggguugauugcaaacucagccccagcuuuggaugcagcugaaacuggacacaccaguucagugcagccugaggaccuuauagagacuagauaugugauugcagaccaaaccagacaugaaaccuccauugaaucuuuuuuggguagggcuggauguguggccacuauuaguuuagacauuaaccaugaugacuaccaaaagaauuacaaaaauugggcaauuaguuuacaagaaaugucacaaauuaggaggaaauuugaaauguuuacauaugucagauuugauuccgaaauaacaauaguaccauguguugcugccacagaagguaacuugggacacauuguugugcaauacauguuuguaccaccaggagcaccucucccuguuaguagaacugacaacacuuggcaaucuagcacaaaugcaucagucuuuuggcagguuggucaaacuuaucccagauuuucuauaccuuucucaaguauagcuucagcuuacuacauguuuuaugauggauacgacacugauggcacagaugcaguguaugguguuagugugacuaacgauauggggacuauauguguuagaauuguuacagaccaacaacaacauagaguuaagaucgacuccaugguauaucuaaaagcuaaacacaucaaggcauggugucccagaccuccaagagcagucacauauaaccauacauauaauccaaauuauguuagggcugaugaaacagccacaaaaguccaaacuagagcaaaugucacaacaguagguccaucagacauguuuauucacgccucagaguuuuuauacagaaauuaccaucucacuccagaaaaggaacugaaagaagcaugccaaauuguauauacugcagaucuaguuauacaccgcacaagagacaaaggugaugacuauaucccacaaugcaauuguacagauugcuguuacuacugugcccacaaagacagguauauucccaucaaaguagaauaccauagcuacuacaccauccagaaaucagauuauuauccaaaacauauacaguaugauauacuaauuggugagggaccuucgcaaccaggugauuguggaggaaaacuuuuaugcagacaugguguuauugguauggugacagcuggaggggaaggacauguagcauuuacugauuugaggaaguauagaaugguagaggcugaggagcaagguauaacagauuauguuaaauccuuaggugaugcuuuuggaguaggauuuguagaucaaauuaaagaacaaauuaauaauauaaacccauuaaauaaaaucagugcuaaagugaucaaauggcuaaucagaguaauaucagcacuagugauagcagugcguagccaaggggauccagcaacacuaucagcuacucuacuuuuacuugggugcucuaauuccccguggcgguuccugaaacagaagguguguacaugguuggggcuuagauacauacacaaagaaucagaugguuggaucaagaaauuuacugaaaugugcaaugcagccagaggcuuagaauggauaggguguaagauuucaaaauucauugacuggcugaaauccaugcuaccucaagcacagaacaaaaucaaguuucuccacuucaugaaacaauugcagcuaaaagaaaaacagaucgaugguuuaccuuaugcaacaguuaagcaacaagaagauuaucucaaagaaauggaagagauguuggacauuucaaauaaacuauuaccacuauacccaaaggagaauaagauuauaaaagaucuacucaaacaagcuaaaagcaugacaacaacaucaaagagaguugaaccaguugcaaucauguuucauggagauccagggucagggaaaucagugugcacaaacauccuugcccgcaugauaacuaauccaucagacauauauucccuacccccaaauccaaaguauuuugauggauaccaucaacagacuguaguaauaauggaugaugugaugcaaaacccagauggggaagacaugagcaccuucugccaaaugguuuccucaguuaauuauguagugccaauggcugaucuaccagauaaggguacccuguuuucaucagauuaugucuuuugcaguacaaaucagcauguuuugauuccuccaaccauaucuaccauacccgcccugaaucggcgauuguucuucgaucuaacuguuaaggugaaccccagauaucaggaagcaggaaaacuaaaucuggacugugcauuaaaaccaugcaaucaugaguuaaagguuggaaaugcaagguguuguccucucauuugugguaaggcuauaaccuucauuaacagacacaacaaugaagaauugacacugucccaaauauacaaucaaguaguaaaugaacacaaccgcagauuaaacgugucaaaacacauggaagcaauuuuccagggaccuauugauaugcaagcaccucccccaccagcaauaguugauuuacuuagauccaccagaaaugaagaugucaucaacuacugcaaaaaccaaaauuggauuauuccugcugacaucaguauugagagagaauugaaucugguaaaucuuucaauaucaauucuggcaaaucuaauuagugugauaggaaucauuuacauuauauauaaauuauuuguaucauuacaaggaccuuauaguggacuacccaccaagaaaaaagugauuccagagaaaagagugguaguacaagguccuucuacugaauuuggccuaaguuuaauaaaacauaacacauguauuguagaaacagaaaaugguaaguuuacagguuuaggaauauacgauaaccuauuagucauccccacacaugcugaucccaguagaacugucaagguggauggaguggaaacagaaguguuggacucuuacgauuuguacaacaaagaaggaguaaaauuagaaaucacaguucugaucuuauccagaaaugaaaaguuuagggauauuagaaaauacauaccaaauucugaggaugauuaugucaacuguaaucuggcuuuaguugcaaaccaagauaugccacagauacuggaggucggagauguugucucuuauggcaauauacucuugagugguaauaacaccgccagaaugcucaaauaugaauacccuacaaaaucggguuuuuguggagguguuuuguacaaggugggucaaguaauuggcauacacguagguggcaauggaagacaaggauucucagccauguuacuuaaaagauauuucaaccaacaacaaggucagauaauucuaaagaaaccagucaaggaaguugauuaucccaguauacauaccccuacuaagacaaaacuccaaccaaguguuuuccaugauauuuuucccggaguuaaggaaccugcaguucuaacagaaaaagacccccgguuggaaguagacuugaacuccucucuuuuuucaaaauaugcuggaaauguuaauuuagaaaugaaugaguacaugauuguugcagcaucccauuaugcaucacaacuugaaacacuagacauauccaaccagcaaaugucuauugaggaauguguguauggaacagauaacuuagaagccuuggauuuaaauacuagugcaggauuucccuauguggcuuugggaauuaagaagaaggacuuaauaaauagagagacuagagaugucaguaaaauuaaaaauugcuuagacacuuaugguguagauuuaccaaugauaacauauuuaaaagaugagcucagaacaccagaaaaaauaaaguuaggaaaaacuaggguaauagaagcaaguaguuuaaaugauacuauucauaugagaaugcucuuuggaaacuuguuuaaagccuuucacgcaaauccaggcauaguaacagggugugcaguugguugugauccagaaacauuuuggucuaaaauuccuccaaugcugggugaugggugugugauggcauuugauuauacaaauuaugauggaaguuuacauccaauaugguuuaggcuacuugaaagagugcuggauagguugggauucccaggcugugcaguuagaaaauuaucacacuccacccauauauacaaaggaauguacuaugaaguugauggaggaaugccaucugggugugcagguacuucaaucuucaacucaaugaucaauaacaucauaaucagaacaauaauucuacaugcuuacaagaauauagaccuggaucaguugaggauacuuacauauggugaugauauaauuuuuacuuacccagauaaacuagacauggcuuauuuagcccaaauuggagaaaaauaugguuuaaaaaugacaccugcagacaagucagauacauuuaaggauuuggaucugaguacagcaacuuuccuaaaaagaggcuuuaaaccugacucaaaacacccauuuuuaguccaucccauauauccaauccaggauaucuaugaaucaaucagauggacaaagaaucccagauguuuacaggagcaugugcucaguuuggcucacuuaugcuggcauaguggaccagagcaguaugcugauuuugucaagagaaucagaucaacaucuguugggaagaaccuauacauaccaucuuaugauguacuacuuuaugagugguaugagaaauuuuaaguuaauauauacaguuacuauuuagguaguuuggguguau

SEQ ID NO: 32 - RNA, 7132 nt, Human rhinovirus
uuaaaacuggguguggguuguucccacccacaccucccacguggaguaguacacuguuaucacgguaauuuuguacgccaguuuuauaaccccuuucccuuuuguaacuuagaaguuugaacuugagaccmauaggcgguggucaaccagaucacuaaaggucaagcacuucuguuuccccggucaacguugauaugcuccagcagggcaaaaacagyugcgaucguuauccgcaaagugccuacgcaaagcuuaguaacaucuugaaugauauaugguuggucguuccacuaaaccccauaguagaccuggcagaugaggcuggaaauuccccacuggcgacaguguuccagccugcguggcugccugcgcacucuuaugagugcgaagccauauauuugacaaggugugaagagccccgugugcucacuuugaguccuccggccccugaauguggcuaaccuuaacccugcagcuagugcauacaauccaguguguagcuagucguaaugagcaauugcgggaugggaccaacuacuuuggguguccguguuucacuuuuccuuuuaugauuugcuuauggugacaguauauaguuuauauauuguugccaugggcgcacaaguuuccagacagaauguugguacacacuccacacagaacaugguuucaaauggaucuaguuuaaauuacuuuaauauaaauuacuuuaaggaugcggccuccaguggugcuucaaaauuggaauuuucacaagauccaaguaaauucacugacccagucaaagauguucuugagaagggaaucccaacauuacaaucuccuacaguagaagcaugugguuacucagauagaauaaugcaaauuacaagaggugauucuacaauaacaucacaggacguugcaaaugcaguggugggcuauggaguauggccacauuauuuaagugcaaaagaugccacugccauugacaaacccacacaaccagacacuucaucaaauagauucuacacacuggaaagcaaaauauggaaaccagauuccaagggauggugguggaaguuaccagaugcacugaaggacauggguauauucggagaaaauauguauuaccauuaccuugguagaagugguuacacugugcauguucaauguaaugcuaguaaauuucaucaaggaacuuugcuaauuaugaugauaccugaacaccaguuagcaaaugaaaauucuacuagggcagaugcuggauacaauuacacccauccuggcgagcgaggcagagagguugguggugagcguauuucucaugcuaaccuuccaagugaugauaauuggcucaacuuugauggcacuuuauuagguaaugcucuuauauuuccccaucaguucauuaauuugagaaguaacaauucugcaacacugauagucccuuaugugaaugcugucccaauggauucaaugcuuagacauaauaauuggaguuuagugauaaucccaauuugugaguuauuagcagauuccaaagcuagugcugugguuccaaucacuauaucaauaaguccaauguuugcugaauucucuggagcgcgugcaaaaccaguagcugcuccacaaggccuaccaauuuauaugacaccugguucaggucaauuuaugacgacugaugacuuccaaucaccuucagccuuaccaugguaucacccaaccaaggagaucuugauuccaggggaaguaagaaauuuaauagaaaugugccaaguagacaccuuaaucccuauuaauaauacagcacaaaauuuaagaaaggugaacauguauaccauacaauuaucuaaucaaacagaaauggcccaagagauuuuugcuaucaagguagauauugccucacagccuuuggcaagcaccaugcuuggagaaauugcaaguuacuuuacacauuggacugguaguuugcguuuuagcuuuauguuuuguggcacggcaaauacuacccucaaauugcuuuuggcauacacaccaccaggcauugguaaaccaagagacagaaagcaagcuaugcuuggaacacauauaguuugggauguuggguugcaaucaacagugucuuuaguugucccauggguuagugcuagucauuuuagauacacaucuagagaugaacauucagcagcuggguauauaacauguugguaucaaacaaauuuuguuuuucccccaaacacuccuaauagggcugacauguuguguuuuguaucagcaugcaaggauuuuugcuugcguauggcuagagauacagauaugcauauucaaaaugaugcuauuacacaaaacccagucgaaaauuauguggaagagguacuuaaugaggucuuaguuguaccaaauaucaaagaaagucauccaaguacauccaacucugccccgauuuuagaugcugcugaaacuggacacacuagcaauguacagccagaagauacaauugaaacucgauauguacaaacagcacaaacaagagaugaaaugagcauugagagcuuccuuggcaggucaggaugugugcauuccucaacaauacaaucaaaugagcaacacauuaauaaauuuaaaguauggcacauuaauuuacaagaaauggcccagaucaggcguaaauaugaaauguuuacauauguaagauuugauucagaaguaaccaugguuccauguauugcaggguauggugaugacauaggucacauaguuaugcaauacauguaugugccgccuggggcuccagugccaacaaguagagagcacuuugcauggcagucagguaccaaugcaucaauuuucuggcaacaagggcaacccuuuccaagauuuucauuaccauuuuugaguguugcaucugcuuauuacauguuuuaugauggcuauaauggugacagaaguggagccaaguauggcaccacaguggucaaucgcaugggugcauuguguaugagaguuguaacaaacaagcaacuccauaaaguugaaaucacaacuaacaucuaccauaaagccaagcaugugaaagcaugguguccuagaccaccuagagcuguuccauauagauauguuggaucaacaaauuacaaaccugaucaaggagaaguugcaauuuucauugagcauagagaaaauccaaaauucauuacagcagggccaagugaucuguuuguacauguggguaauuugauauacagaaauuuacauuuauuuaauucagaagcacaugauucaguguuaguaucauauuccucagauuuagucaucuaccgcacaaacacuacaggcaaugacuauauuccuacaugugauugcacucaagcaacuuauuauuguagacacaaagauagguauuacccaauugaugucaccagucacgauugguaugaaauucaagagagugaauacuauccaaaacacauucaauacaaucuuuuaauuggugaaggaccaugugaaccaggagacuguggaggaaagcuauugugcaaacauggagugauuggaauaauaacagcagguggagaaggucacguggcauucauugaucucagacaauuucacugugcagaugagcaaggaauaacugacuacauccacauguugggugaggcuuuuggaucaggauuuguugauaguguuaaagaucaaauaaaugcuaucaauccaauuaacaauaucagcaaaaagauaauuaaaugguugcuuaggauaauaucugcaaugguuauaaucaucagaaauuccucugauccacaaacaaucauagcuacauuaacacuaauugguugcucagguucuccuuggcgguuucuuaaagaaaaguuuuguaaauggacccaauuaaauuauauacauaaggaaucugauucauggcuaaagaaauuuacugaaaugugcaacgcagccaggggccuagaguggauuggaaacaaaauaucaaaauucauugaauggaugaaaucuaugcucccucaagcucagcuuaaagucaaauauuugagugagcuuaaaaaacuuaguuuuuuagagaagcaaauagaacacuugagaguugcugauucacaaacacaggaaaagaucaaaugugagauugauaccuuacaugaucucucuugcaaauuuuugccacucuaugccagugaagcuaaaagaauaaagauucuacauaacaaguguaauacaauuauuaagcagaagaaaaggugugaaccaguugcaguugccauacauggugaaccugguacuggcaaaucuaugacuacaaauuuucuugcuagaaugauaacuaaugauagugacauuuacucccuaccaccugacccuaaauauuuugauggauaugaccagcagaguguaguuaucauggaugacauuaugcagaacccaaguggggaagauaugacccuauucugucaaaugguaucuaguguuacauuuauaccaccaauggcugaccuaccugauaagggcaaaccuuuugauuccagauuuguauugugcaguacuaaccauaauuuauuagcaccacccacgauuacuucguugccagccaugaacagaagauucuuuuuagauuuagauauuguggugugugauaaauauaaggauccacagggaaaauuaaauguagcugcugcuuuucaaccuugugauguaaauacaaaaauuggaaacgcucgcugcuguccuuuuauuugugguaaagcuguuauuuucagagaucguaauaauugucaaacuuacacucuggcacaaguguauaaucgaauacuuguugaagacaaaaggcguaggcaaguuguggauguuauggcagcaaucuuucagggaccuauuacucuugaggggccuccaccugcagcaauaaaugaucuauugaaaucagucagaacuccagaagucauuaaauauugugaggauaauaaauggguagugccagcugaguguaagguugagagagaucucaauauagccaauacaguuauuacaauuauugcuaacauuauuaguaucucuggaauaauuuauguuauauauaaacuuuucuguacauugcaagggccauauucaggugaacccaagccuaaaaccaagauaccagaaaggagaguaguggcucaagggccagaagaagaauuugguaggucgcuuauuaaacacaacucauguauuguaacaacacagaauggcaaauucacagguuuagggauuuaugauagaacauuaaucuugccaacacaugcagauccagguggugaaauacaaauagaugguauuacaacuaaaguagaagauuccuaugauuuguuuaauaaagaugggaucaagcuagaaauuacagugcuuaaacuuaagagaaaugaaaaguuuaaggauaucagaaaguacauuccagaaaaugaagaugauuauccagauuguaauuuggcccuaucugcuaaucaaccagagacuacaauaauuaaugucggggauguagugucauauggaaacauuuugcuuaguggaaaucaaacagcaaggaugcucaaauauaauuacccaacaaaaucagguuauuguggugggauucuauacaaaauuggacaaguuuuggggauucauguuggugguaauggaagggacggguuugcagccaugcuacuaagaucauauuuuucagaaacacaaggccaaauaaccaccacuaagccuacuauugaauguaauuuaccuaguauucacacaccuaguaaaacuaaguuacaaccuaguguauuuuaugaugucuuucccgguaguaaggagccagcugugcucucagaauaugaccccagauuagagguugauuuuaaacaagcuuuauuuucuaaauacaaagguaauaaccaaugugaaauaaaugaucaugucaggguggcaauuucucauuauucagcacaguuaaugacauuagauauugauucaaauccaaucucauuagaagauaguguuuuugguacggaggguuuggaagcgcuugaucuuaccacuagugcuggauuuccuuauguaucuauggguauuaagaaaagagacuugauuaauaaacaaacaagagacauuacaaaacucaaaauggcauuagauaaguaugguguugauuuaccuauggucacauuucucaaggaugaacuuaggaaaaaagaaaagauuucugcuggaaaaacacgugucauugaagcuaguaguguaaaugacacuguacuguuuagaacaaccuuugguaaccucuuuucuaaauuucaucuaaauccuggcaucguuacugguucugcagugggaugugauccagaaaccuucuggucaaaaauaccagugauguuagauggugagugcauaauggcauuugauuauacaaauuaugaugguagcauacacccaaucugguuugaagcccucaaagaaguacucucuaauuugggguucaagccuaauuuaauagauagauuguguagaucaaaacauauuuuuaaaaauguauauuaugagguugaggggggggugccaucagguuguucuggaacaagcauauuuaauacaaugauuaauaauguuauuauuagggcauuaguucuagaugcuuacaaaaauauugauuuagauaagcuuaagauaauagccuauggagaugauguuaucuuuucuuauaaguaucaguuagauauggaagcaauugccaaggaagguaucaaguauggucuuacaaucaccccagcugauaaaucaagugaauucaaaaaguuagacuacaacaguguaaccuuucuaaagagaggauucaaacaggaugacaaguacucauuucuaauacauccaacuuuuccaguugaugagauacaagaauccauucgauggacuaaaaaaccaucucagaugcaagaacauguucugucacugugucacuuaauguggcacaacggcagggauguguauaagcaguucgagcaaaagauacgcagugugagcgcuggucgcgcacuguauaucccaccauacgaucugcuuuugcaugaaugguaugaaaaauuuuaaguuguuuagauauagaaauaauaaacaauuaguuuuuuaguuuuau

SEQ ID NO: 33 - RNA, 7109 nt, Human rhinovirus
uuaaaacuggaucuggguuguucccacuuggaucucccaaagggagugguacucuguuauuacgguaacuuuguacgccaguuuuauccuccccuuaccccauguaacuuagaaguuuuucauaaagaccaauaguugguaaucauccagauuacuuaaggucaagcacuucuguuuccccggucaauguugauaugcuccaacagggcaaaaacaacugcgaucguuauccgcaaagcgccuacgcaaagcuuaguagcaccuuugagauuguuugguuggucguuccgccauuuccccugguagaccuggcagaugaggcuagaaguaccccacuggcgacaguguucuagccugcguggcugccugcacacccugugggugugaagccaaauaauggacaaggugugaagagccccgugugcucgcuuugaguccuccggccccugaaugcggcuaaccuuaacccugcagcuagagcauacaaaccaguguguaucuagucguaaugagcaauugcgggaugggaccgacuacuuuggguguccguguuucacuuuuuuuuuacuuauaauugcuuauggugacaauauauauauaguauauauugacaccaugggcgcacagguaucuagacagaauguuggaacccacucuacacaaaacucuguaucuaauggaucuagcuuaaacuacuucaacaucaacuacuucaaagaugcugcuucaaauggugcauccaaauuagaguucacucaggacccuagcaaauucacagaucccguuaaagauguauuagagaagggaauaccaacacugcaaucacccacaguugaggcuuguggauauucggauagaaucauacagauuacuagaggagauucaacaauaacaucacaggauguggcaaaugccguuguugcauaugguguuuggccacacuauuuauccucuaaagaugcuucugcaauugacaagccuucccgcccagacacaucuuccaauagauuuuauacuuuaaagagugugacuuggucuaacucuucaaaagguuggugguggaaauuaccggaugcauugaaggaaaugggcaucuuuggugaaaauauguuuuaccacuauuugggcagaagugguuauacaauacauguacaguguaaugcuaguaaauuccaucaagguacauuaaucguugcacuaauaccugaacaccaaauugcaagugcacuccauggugaugugaauguugguuauaaauauacucacccaggagaagcagggagagaaguuaaaagugacagaaauauaaaccuaaaugugcaacccacugaagaauacuggcugaauuuugauggaacacuacuuggaaacaucaccauauucccucaucaauucauuaaccugagaagcaacaacucugcuacaauaauugcuccauauguuaaugcaguucccauggauucaaugcgcagucacaacaacuggagccuggugauaaucccaauauguccucuugaaacaucaaguacuguuaacacaauaccuauuacaauaucaauaagucccaugugugcagaguuuucuggagcacgugccaaaaaccagggucuaccaguuuucaucacgccagggucaggucaauuucuaacaacagaugauuuucaauccccaugugcacucccuugguaccacccaaccaaggaaauaucuaucccaggugagguaaaaaaccuaguugaaauaugucaaguggauagcuuaguaccaauaaauaauacugagaauaacaucaccaauggggacauguauucaguuauauugcaaucaacaauuggagaaccagacaaaaucuuuucaaucaaaacagauguagccucucagccacuagccaccacucuaauuggugaaauauccagcuauuacacucacuggacaggaagccuccguuucaguuucauguuuugugguacagccaacacuacuguuaaacucuuacuagccuauacaccgccugguauuagagagcccacuacaagaagagaagcaauguuaggcacucauguaauaugggauauaggucuucaaucuacaauaucaauggugguaccauggauuagugcuagccacuacagaaacacaucaucgggugcaucuacagcuggguauguaacaugcugguaucaaaccagauuaguaauuccaccucaaaccccacccacagcuagguuacuauguuuuguaucaggcugcaaggacuuuuguuuacgcauggcucgagacacuaauuuacaucuacagagugggccaauagagcaaaacccuguugaacaauauauagaugagguccuuaaugagguuuuaguuguuccaaauauuaauaguagucaucccacaacaucaaacucugccccagcacuagacgcugcagaaacagggcauacuaguaaugugcagccugaagaugucauugaaaccagauauguacagacaucacaaacaagagaugagaugaguuuagagaguuuucuugguagaucaggguguauacaugaaucuaaacuggaggucacgcuuacaaauuacaaugaaaacaauuucaaaguguggaacauuaaccuacaagagauggcccagauuagaaggaaauuugaacuguucaccuauacuagauuugacucagagauaacccuagucccauguauuucugcacuuagugaggacauuggacauauuacuaugcaauacauguauguaccaccaggugcaccuguaccaaagagcagggaugauuaugcauggcagucuggcacuaaugcaucuauuuucuggcaacauggacaagcauacccaagauuuucucuacccuuucugagcguggcuucagcuuauuauauguuuuaugauggauauaaugaggaagggcaaaauuaugguacggugagcacaaauaacaugggaucauuauguucuagaauagugacagagaaacacauucauaauaugcacauuaugacaagaaucuaucacaaagcuaaacaugucaaagcguggugcccgcgcccacccagagcacucgaauauacucgugcacaccgcaccaauuuuaagauucaaaauagagauaucaaaacaggaauuaaauccagaccaauuauuacaacagcuggcccuagugauauguauguccauguugguaaucuuauuuauagaaaucuacaucucuucaacucugaaaugcaugaaucuauacugguauccuacucaucagauuuaaucauuuaccgaacaaacacuauaggugaugauuauauucccucuugugauugcacccaggcuacauauuauuguaaacauaaaaguagauauuucccaauaacagugacaagccaugacugguaugaaauacaggaaagugaauacuaucccaaacauauacaauacaacuugcuaauuggcgaaggcccuugugaaccaggugauuguggugggaaauuauuauguaaacaugguguuauuggcauaguaacagcugguggugacaaucauguggcuuucaucgaucuuagacacuuucauugugcugaagagcaaggagucacagauuacauacacaugcuaggugaagcauuuggaaauggauucguagauaguguaaaagaacacauacaugccauuaacccaguuggaaauauuagcaaaaagaucaucaaauggaugcuaaggauaauaucugcaauggucauaauaauaaggaacuccucugauccacaaacuauauuggcaacacucacacugauuggauguucugguucaccauggagauuuuuaaaagagaaauuuuguaaauggacacaacuuaauuauauacacaaagagucagacucaugguugaagaaauuuacugaagcauguaaugcagccagagggcuugaguggauaggaaacaaaauaucuaaauucauugaauggaugaagucaaugcuuccacaagcacaacucaagguuaaguacuuaaaugaacuuaaaaaauugagccuguaugaaaagcaaguugaaagucuuagaauagcagauguaagaacacaagaaaaaaucaaaauggaaauugacacucuacaugacuuaucaugcaaguuucugccauuauaugcaagugaagcaaagagaauaaagacacuacacaucaagugugauaacauuaucaaacaaaagaaaagaugugagccgguggcuguagucauccaugggccaccuggcgcuggaaaaucaauaacaacaaauuuucuagccaggaugauaaccaaugauagugauauauacucuuuaccuccagauccaaaauauuuugauggcuacgaucaacaaagugucguaauaauggaugauaucaugcaaaauccagcuggggaugauaugacccuauucugucaaaugguuuccagugucacuuuuauaccaccaauggcugauuuaccagacaagggcaaggccuuugacucuagguuuguacuauguagcacaaaucacucacuuuuagcaccaccuacaauaacaucacuaccugcaaugaauagaagguucuuuuuagauuuagacauauuagugcaugauaauuucaaggacucacaaggcaaacuuaauguagcagcagccuuccaaccaugcgacguggacaacaaaauugggaaugcccgguguuguccauucguguguggaaaggcuguuucuuucaaggaucgcaacaccugcaauaaauacaccuuagcacaaguauacaacauaaugcuugaagaagacaaacgcaggagacaagugguugacguuaugucagccauuuuccagggaccaauugacaugaaaaacccaccgccgccugcaauuacagaucuacuccaaucaguuaggacucccgaggucaucaaguauugugaagacaauagguggauaauaccagcagaauguaagauagaaaaggaguuaaauuuagcuaauacaaucauaacaaucauugccaaugucauuaguauagcagguauuauauauguuaucuauaaacucuucugcacacuacaagggccauauucaggagaacccaaaccuaaaacuaaaguuccagagaggcgcguuguagcgcaaggaccggaggaagaauuuggaaugucuuugauuaagcacaauucaugugugauuacaacagauaauggaaaguuuacaggucuuggaauuuaugacaaguuugugguugugccaacgcaugcagacccugggaaagaaauucaaguugaugguauaacuacaaaaguugcugacucauucgauuuguauaauaaagauggaauaaaguuggaaauaacagucuuaaaauuagauaggaaugaaaaauuuagagacaucagaaaauacauaccaaauaaugaagaugacuacccugacuguaaccuagccuugcuagcaaaucaaccugagcccacuauaauuaauguuggagauguuguaucuuauggcaacauacuacucagugguaaccagacagcuagaaugcucaaguacaacuauccaacaaaaucuggguacuguggggguguucuguauaaaauugggcaggugcuugggauacauguaggagggaaugguagggauggauuuucagcuauguuacuuagaucuuacuucacugaugugcagggucaaauaguuucaucaaagaagacuagugaguguaaucuccccaguauacauagcccauccaaaacaaaauugcagcccaguguuuucuaugauguuuuccccgguucaaaagaaccagcuguguuguccgagaaagaugcucgacuccaggucgacuuuaaugaggcacuguuuuccaaauacaaaggaaacacaaacuguucuaugaaugaucacauaaggauugcaucuucacacuaugcagcucaguuaauuacuuuagauauugacccaaguccuaucacucuugaagauaguguuuuugguacugauggacuagaagcucuugaucuaaacacuagugcaggauucccuuacaucacaauggguauaaagaagagagaucuaauaaauaacaagaccaaggauauaaguaaacuuagggaagcaauugacaaauaugggguugacuugccuaugguuacuuucuuaaaggaugaacuuaggaaacaugaaaaaauaauaaaggguaaaacuagagucauugaggcuaguagugugaaugauacucugcuauuuagaacaacuuuugggaaucuuuuuucaaaguuucauuuaaauccuggaauugucacuggaucagcagucgggugugacccagagaucuuuuggucgaagauaccggcaauguuggaugauaaguguauaauggccuuugauuacacaaauuaugaugguaguauacaccccauuugguuugaagcucuuaaacaaguauugauggauuugucuuuugauccuauguuaauagauagauuauguaaauccaaacauaucuucagaaacacauacuaugagguugaagggggcguuccaucuggaugcucagguacuaguauuuuuaauacaaugauuaauaauauuauuauaagaacuuuaguguuagaugcuuauaaaaauauagacuuagauaagcucaagauaauugcuuauggugaugauguuauauuuucauauacauaugaauuagacauggaagcuauagcaauggaggguacuaaauauggcuuaaccauaaccccugcugacaaaucuaccacuuuugugaaauuaaauuacaauaaugucaccuuuuuaaaaagaggauucaagcaagaugagaaauacaacuucuugauacacccuacauuuccugagagugaaauauuugaauccaucagguggacaaagaaaccuucacaaaugcaugagcacguacuauccuugugucacuuaauguggcauaaugggcgugaugcauacgaaaaguuuguggagaagauacgcagugugagcgcuggucgugcauuguauaucccuccauauaacuugcuuuugcaugagugguacgaaaaauuuuaaacugauauagaaauauuaaacaguuaguuuauuaguuuuau

SEQ ID NO: 34 - RNA, 7118 nt, Human rhinovirus
uuaaaacuggguccagguuguucccaccuggaucuccuaaugggaguuguacucuguuauuccgguaacuuuguaugccaguuuuaucucccuacccccaauguaacuuagaagauguacacaacgaccaauaggugaugaucaaccagauuaucaaaggucaagcacuucuguuuucccgguuagaguugauaugcuccaacagggcaaaaacaacuuuaaucguuauccgcaaagcgccuacgcaaagccuaguaacagcuucgaagauuuaugguuggucguuccgcuguuccccacaguagaccuggcagaugaggcuagagauuccccacugguaacaguguucuagccugcguggcugccugcgcacccuucgggugcgaagccauauuucggacaaggugcgaagagccccgugugcucgcuuugaguccuccggccccugaauguggcuaaccuuaacccugcagcuagugcauacaaaccaguauguggcuagucguaaugagcaauugcgggaugggaccaacuacuuuggguguccguguuucucuuuuuccuuuuauuauugcuuauggugacaauauauaguuuauauauuggcaccaugggcgcucagguaucuagacagaauguuggcacacacucaacacaaaauucaguaucaaauggauccagccuaaauuauuuuaacaucaauuauuuuaaggaugcugccucacauggcgcuucaaaauuagauuuuucccaggauccaaguaaauuuacugacccagucaaagauguuuuggagaaggguaucccuacucuucaaucaccaacuguagaggcauguggguauucagauaggaucauucaaauuacaaggggagauucuacaauaacaucucaagauguggcaaaugcgguaguuggcuauggaguauggccccacuacuuaucaucacaagaugccacagcuauugauaaaccaucacguccugacacuucaucaaacagauuuuacacuuuagagaguaaaucaugggauagcaugucaaaaggauggugguggaaauugccagaugcucuuaaagaaauggguauuuuuggugaaaauauguauuaucauuucuugggaaggagugguuacacuguacauguacaguguaaugcaaguaaauuucaucaaggaacauuaauuguggcaaugauaccagaacaucaauuagcaagugcaacccaugggaaugugacugcuggguacaauuacacacaccccggggagagggguagaaccauuaauguagugaaccgugaucaaaaugacaaacaaccuagugaugauaauuggcucaacuuugacggaacacuauuagguaauaucacaaucuacccacaucagcuuauuaacuugaggagcaacaacucagccacaauuauagucccauauguuaaugcaguaccaauggacucuaugccuagacacaauaauuggaguuuaguaauuauaccuauaugcccauuagaaggaaccccaaccacaguacccauuacuauuuccauuaguccaaugugugcugaguucucuggugcucgagcaaaaagucaaggucuaccgguuaugcuaacaccuggaucuggccaguuuaugacuacugaugauuuccaaucuccuugugcuuuaccuugguaccacccaaccaaagagauaucaauaccaggucagguuaggaauuuaauugaguuaugucaaguagauacauuaaucccaauaaacaaucuugagcacaauaccacuaacauuaacauguauucaguugucuugagcaaugaaacagagauggcaaaggaaauuuuugccaucaaaguugauauugcuucccaacccuuagcaacuaccuugauuggagagguuucaaguuacuacacacacuggacuggcagucucagguucaguuuuuuguucuguggaucugcuaacacuacacucaaacuccuaauagcuuacacaccaccagguauugguaaaccaacuaacaggaaagaagcuauguuaggcacucauguugucugggaugucggacuacaauccaccauaucaaugguggugccauggguuagugccagucacuacagaaacacaacuccugacacauacucuuuagccggauauauaaccuguugguaucaaacaaaucucauagcaccaccaaacacaccgucaacagcuagaaugcucuguuuuguuucaggaugcaaggauuucugcuuaaggauggcccgagauaccaauuuacacacucaaucuggaaauauugaacaaaauccaguggagaauuacauagaugaaguauuaaaugagguauuaguugucccaaauaucaaggagagucaagccacuacaucaaacucugccccugcuuuagaugcagcugaaacuggacacacaaguaaugugcagccugaagauaugcuugaaacuagauaugugcaaacaucgcagacaagagaugaaaugagcauugaaaguuuccuagguagaucugguuguauacauauaucuaaauuaguuguugauuaugaugguuacaaugaggaaacaaagaacuucaagaaauggcaaaucaaccuacaagaaauggcacagaucagaaggaaauuugagauguucaccuaugugagguuugauucugaggucacauuaguaccauccauagcugccaaggguguugauauuggacauguugucaugcaauacauguaugucccaccaggugcaccaauacccaagacuagggaugauuuugccuggcaaucuggaacuaaugcuucaaucuuuuggcaacauggucaaacauacccuagauucucucuaccauucuugaguauagcaucugcauauuacauguuuuaugaugguuaugauggugauaaaucuacauccagguaugguacaguaguuaccaaugacaugggcacuuuguguucuaggauugucacugaugagcaccaaaauaaaguggaaaucacaaccagaguauaccauaaagccaaacacauaaaagucugguguccaagaccaccaagagcuguugaauacacacacacccaugucacuaacuacaagaaaagugaugcuacugagaagacugcaauugcaacuagaccaaagaucacaguggcuggccccagugacauguauguacauguagggaaucuuauauauagaaauuuacaucuauucaacucagagaugcaugauucaaucuuagucuccuauuccucagacuuagucauauaccgcacaaauacaauaggugaugacuauaucccaacaugugauuguacugaugccacuuauuauugcaaacacaaaaacagguauuacccaauuaaaguaacaagucaugauugguacgaaauccaggaaagugaauauuacccaaagcacauacaauauaaccuuuuaauuggggaaggaccaugugaaccaggugauuguggaggcaaguuguuguguaaacauggaguaauuggaauugugacugcugguggagaaggacauguggcauucauugaucuuagacauuuccauugugcugaagaacaggguauaacugacuauguccacauguuaggugaagccuuugguuugggguuuguagauaguguuaaagaucaaauaaaugcaaucaacccaauuaauaguaucaguaagaagauuauaaaauggcuuuugagaauuauaucagcaaugguaaucauaauaagaaauucaucugauccacaaacaauaauugcaacauuaacucuaauugguuguucugguucaccauggagauuucuuaaagaaaaauucuguaaauggacucaacucaacuauauccacaaggaaucagacucaugguuaaagaaauuuacugagauguguaaugcagcuagaggucuagaauggauuggcaauaaaaucucaaaguuuauugaguggaugaaaucuaugcugccccaagcucaacuuaaaaucaaguacuuaagugaacuaaagaaauugaacuuucuugagaaacaaauggaacaccuuagaguugcugauucccagauucaagaaaaaauuaaacaugaaguugacacacuacaugauuuauccugcaaauuucucccacuuuaugccagugaggcaaaaagaauuaaagucuuguauaacaaauguaauaccaucaucaagcaaaagaaaaggugugaacccguagcuguggugauacauggugaaccuggaacuggcaagucuaugacuacaagcuuucuggcaaggaugauaaccaaugaaagugauaucuacucgcuaccaccagauccuaaauacuuugauggauaugaucaacagagugugguuaucauggaugaugugaugcaaaaucccaguggagaugacaugacccuauuuugucagauggugucuagugucacuuuuauaccaccaauggcugauuuaccagauaaagggaagccauuugauuccagauuuguguuguguaguacuaaccauaguuugcuagcaccuccuacuauawcuuccuuaccagcuaugaauagaagguuuuucuuagauuuagauauuauagugugugauaaguauaaagauucacaagggaaauuaaauguuucugcugcuuuccaaccaugugauguaaauacaaaaauugguaaugcccgcuguugcccuuuuauuugugguaaagcuguuaacuuuagggaucguaacacaugccaaacuuacaccuuggcacaagucuacaaccaaaugcuugaagaagauaaaagacgcaggcragucauugauguuaugacagcaauauuccaagggccaauuagucuagagggacccccaccagcagcaauaagugaucuauugcauucuguuagaacuccugaagugaucaaauacugugaagacaauaaauggauuguaccagcagaauguaagauagaaagagaccuuaauauagcuaauacaaucauuacaauuauagcuaauauuauuaguauuucaggaauaauuuauguaauauacaaacuuuucugcacacugcaaggaccauacucaggagaaccuaaaccuaagaccaggaugccagaacguagaguaguagcucaaggaccugaagaagaauuuggcagaucucuuauuaaacauaauucauguguugugacuacugaaaauggaaaauuuacagguuuaggaauuuaugauagaacauuaauuauaccaacacaugcugacccaggaaaggagguacaaauagauggcauuacuacuaaaguggaagacuccuaugauuuguucaauaaagauggagucaagcuagagauuacugugcuuaaacuuaagaggaaugaaaaauuuaaagauauuaggaaguauaucccagaaaaugaagaugauuacccagauuguaauuuggcauuguccgcuaaucaaccagaaaccaccauaauuagaguaggugauguaguuucuuauggaaacaucuuauuaagugggaaccaaacagccagaaugcucaaguauaacuauccaacaaaaucaggauauugcggugguauuuuauacaaaauuggacagguccuuggaauucauguugguggaaauggaagagauggauuugcugcaauguuacucagauccuacuuuuccgaaacacaaggucagauaauuaccuccaaauccacuauagagugcaacuuacccaguauacacacaccaagcaaaacuaaauugcaacccagugucuucuaugauguguuuccagguaauaaagaaccagcuguccuuucuaaucaugauccaagguugaaaguugauuuuaaugaagcacucuuuuccaaauauaaaggaaauaaccauugcacaaugaaugaucauauuaagguggcuaucucacauuauucagcacaauuggcuacguuagauauaaacccaaguccuauaucuauagaagauaguguuuuugguauagagggucuagaagcacuugaucucaauaccagugcaggauuccccuauguauccaugggaauuaaaaagagagauuuaauaaacaaacaaacuaaagacauuuccaaauuaaagauggcauuggauaaauaugguguugauuuacccauggucacuuuccuuaaggaugagcuuagaaagaaagaaaaaaucucugcaggcaagacucgugugauagaagcaagcagugugaaugauacuguauuguuuaggacaaccuuugguaaucuuuuuucuaaauuucaucucaauccaggaauuguuacuggcucugcaguggggugugacccagaaacuuuuuggucaaaaauaccagucaugcuagauggugaauguauaauggcauuugauuauacuaauuaugaugguagcauacauccaauaugguuucaagcccuuaaagagguuuuaaauaaccugucauuugaagcuaguuugauagauaggcuuugcaacucaaaacacauuuucaaaaacauguauuaugaaguugaggguggaguuccaucaggaugcucuggcacaagcauauuuaauacaaugauuaauaaugucauuaucagaacauuaguuuuagaugcauauaaaaacauugauuuagauaagcuuaaaauaauagcauauggagaugauguaauuuucucauacaaauaccaacuugauauggaagcaauugcaaaggagggugugaaauauggucuaacaauaaccccagcugacaaaucugagaauuuuaaacaacuugauuacaauaaugugaccuuucuaaaaagggguuuuaagcaagaugagaaauacaguuuucugauacacccaaccuuuccaauugaagaaauucaagaauccauucgauggacaaagaaaccaucacaaaugcaggagcacguucuguccuugugucaucuaauguggcacaaugguagagauguguacaaacaauuugagcagcggauacgcaguguuggugcuggucgcgcacuguacauucccccauacgaucugcucuugcaugaaugguaugaaaaauuuuagauuauuuagauauagaaguaauaaauaauuaguuuuuuaguuuuau

SEQ ID NO: 35 - RNA, 7152 nt, Human rhinovirus
uuaaaacuggguguggguuguacccacccacacugucuacggacguagugcucucauauuacgguauguuugcacgccaguuuuuaccccccccccaaauuuguaacauuagaagucugcacucuuaaccuggucaauaggagguagcaauccaugcuaucuaagaccaagcacuucuguuaccccgguaugcggagaauagacuccaaaaggguugaagcuccaaauaucguuauccgcacaauuacuacacaaagccuaguaauaucuugauaagcucuuugguuggucguucagcuguuacccccaguagacuuggcagaugaggcuggguguuccccacuggcgacagugacccagccugcguggcugccuacacaccuggagacaggugugaagccaaaaguggacaaggugugaagagccccgugugcuaauugugauuccuccggccccugaaugcggcuaauccaaccccacagccaaugcauguaaaccaacauguauuuggucguaacggguaacugugggacggaaccgacuacuuuggguguccguguuuccuuuuauuuuuruugcuuauggugacaaguauugguauauauuugucaucaugggcgcccagguuuccagacagaauguaggaacucacucuacucaaaauacaguugcuaaugggucuagcuugaacuauuuuaacaucaacuauuuuaaggaugcugccucuaguggugcuucccguuuagauuuuucucaggauccuagcaaauuuacugacccaguuaaggauguuuuaauaaagggaguaccaacacuacaaucgccaacaguagaagcuuguggguauucagacaggauaauccaaauaacucguggaaauucaacuauuacaucacaggacauagcaaaugcaguaguugcauauggugucuggccucauuacuuaucugauacugaugcuaaugccauugacaaaccaucacauccggauacuucaucagacagauuuuacaccuuggacaguaaauuguggucaaaugagucaaaggguuggugguggaaauugccagaugcccucaaagauaugggcaucuuuggagaaaacauguucuaucauuuucuugguaggacuggguauacaauucauguacaaugcaaugcuaguaaauuucaucaagggacauuaguaguagcugcuauaccagaacaucaauuagcuuuuauugggaaagguaaugugaguguuggcuacagacauacacacccaggagaaaauggacgaacacuuaauggcucaaggguagauggcaauucaaagcaacccaccgaagaaaguuggcuaaauugugaugguacacuuuuggguaacaucacaauauauccacaucaguuuaucaaucuuaggaguaauaacucagcuacacucauucuacccuauguuaaugcuguacccauggauucaaugcuuagacacaacaacuggagucuaguaauuauaccugugucaccccuggcuucugaaucuacggacaaaguuccaauaacaaucucuauaaguccuauguguucagaguuuucaggugcuagaaaucaaucuacuaagcaaggcuuaccuguuaugcuaacuccaggcucugcacaauuucuuaccacagaugauacacaauccccuucagcccucccuuauuuucauccaacaaaagagauuuuuauaccugguaaggugagcaaucuaucagaaauuugccaaguagauucaaugauaccagugaacaauaccacuccaguaaauaauucaauugguauguauacaguacggguugagguacaaacagauuuuaaaaaagaaauuuuugccaucccuguugauguggcaucacaaccccuaucaaccacacucauaggugagauugcuaauuauuauacucauuggacagguucucuuagauucucuuuuauguuuuguggcacagcaagcacuaguuugaaguuacucauugcauacacaccaccaggaguugauaaacccaacacaaggacuaaagcuauguugggaacucauguggugugggauguuggguugcaaucuacaguuuccauggugguccccuggauauccgcuagccacuauagauuuacuaccccagauacauacucacaagcagguuacaucacuuguugguaucaaacuaauuuugugacccccccaagcaccccuaaauaugcugacaucauauguuuuguuucaggauguaaggauuucuguuuaagaauggccagagacaccaauuuacauucacaaacagugaauauuacacaaaacccuguugaaaaauauacagaggcuuuacucaaugaaguguuggugguucccaacauacaaccuagcagugggcacacaucuaaugcugcaccagcucuagaugcugcugagacaggacauacuagucaaguucaaccagaagauaugguagagaccagguauguugucacagaccaaacuagagaugaaaugaguauagagaguuucuuggguagaucugcuugcguagcaaucauccauacaaaccuugagcauguugaagcagacagacaagccuacaaugcaaaagggaaaaauuucucuacauggaaaauuacacucaaagaaauggcucaaauuagaagaaagugugaacuuuucacauacuuaagauuugauucagagaucacuauaguugcuaccauugcuggacagggugaugacauagggcacauuguacuucaauacauguauguacccccuggaggaccaguuccacuuacuaggaaagaugaugaguggcaaucaggaacuaaugcuucaguauucuggcaacauggacaaccauacccuagauuuacaaucccuuuuguaagcauagccucagcauacuacauguuuuaugauggguaugaaggugauaguuugaccucacaguacgguucaguagucacaaaugcuauggggacacuauguguucguguggucacagagcaacaaaaacaugagguuaacauaacuagcaggauuuaccacaaagccaaacaugucagugcauggugcccucguccuccucgugcuguagccuaccaacacacauacaguacaaacuucguuccaaaagagggauuugaaggcuugaaaacucagauuaaaacuagggcagacaucaaacuugugaacuuuggacccucagaucuauuuguacacauggaugaucuaguauauagaaacuuacauuugugugaaccagaaaaucugaaugacucagugcugaucuguuacucaagugauuuagucauauaccgaacaaacacaaaaggugaugacguaaucccaacaugugauugcacccaagcuacauauuacuguaaacauaaaaauagauacuauccaauuaauguuaagaagcaugauugguaugaaauccaagaaucugaauauuauccaaaacauauccaguguaauauacuaauuggagagggccccugugaaccaggugacugugguggaaaacuacuuuguaaacaugguguuauuggauuauuaacugcugguggaaguggacauguagcuuucauugaucuuagggacuuucauguugcagacacacagggaauuacagacuauguccacaaccuuggagaggcauuuggugcuggguucauagauaacaucagagaacaaauucagguaauuaaccccaucaacaagaucacaggaaaaauaguaaaguggauuaucaggauuauaucagcuauuacaauuauaauuagaaacagugcagauccccauacaguuguggccacucuggcauuaauaggaugcucuggaucucccuggagauucauuaaagaaaagguauguaauugguuacaacuaaguuauguucacaaagaaucagaugguuggauuaagaaguuuacagagaugugcaacgcagcuagggguuuagaaugguuaggcaauaaaauaucaaaauuuauugacuggguuaaaucaaugcuuccacaggcaaagcuuaaaguggaguauauuaaaaaucuuaaacagcuuccucuauuagagaaagagauugauggauuacgauuggccucccagaagcaacaacaagaauauauugauacacuuagaauuauguuagauucaucaaauaaguucuuaccacuuuaugcuucugaaaauaaaagaauuaaagagcuccuaaagagaagugaaaugauucugcgcaccucuaagagaacagaaccaguuggggugcucuuccauggugaaccaggaacagguaaaucaauugcuacuuccaucuuagccagaauguugacuacugaaucagauauauacucucuuccaccuucaccuaaguauuuugauggauaugaucaacaaaguguggucauaauggaugauauaaugcaaaauccaaauggugaggauauguccuuauuuugccagaugguuucaucagucccauuuauuccaccuauggcugaccuaccugauaaggguaaaccuuucuccucugauuacguuuuagccaguaccaaucauaacuuauugcacccacccacaauaaccugcaccacugcuaugaacaggagguuuuuccuugaucuggauauagugguuaaagauguuuuuaaaauaaaucaggguaggcuuaaucuacagugugcucuuaaaccaugcaaggaagggaaaguggguaaugcuaaguguugcccccucauaugugggaaagcaguggucuuuagagauagaaauacaggggauuaccuuuccuuaucaacuauauauaauagaauaacagaagaaaguagaaauagaaaagaguuaaauaccucauuacaggcuaucuuccaagguccaauagaugucauuaauaaaccaccaccaccagcaauuuuagaccuacucaaaucagucagaaacccugauguuaucaaguauugugaagaaaauaaauggaugauaccagcugauuguaaguuagaaagagauuuaaacuaugccaauuuaguuauaucaaugauugcuaauguaauuaguauuuuggguguaauuuauauuaucuauaagcucuucuguucacugcagggaccauauucuggugagccaaaaccaauaucuagaaaaccagaaagaagaaucguaacacaagguccacaagaagaauuuggacguaguuuacucaaacacaaugcauguauaguuacuacugagaaugguaaguucacaggcuugggaauuuaugacaauguuaugauucuaccaacucaugcugauguagggagaacuguagacauagauggcauacaaacaaaaguagcagaugccuaugaccugcacaauucacaagggguaaaacuugaaauuacaguggucaaacuaaauagaaaugagaaauuuagggauaucaggaaauauauuccagauagugaggaugauuauccugauuguuguuuggcuuuauuggcuaaucaaccagagccaacaauaauagagauaggugauagcugcuccuauggaaauauuuuacuuaguggcaaucaaacagcuagaaugaucaaauauaauuacccaacaaaaucaggauucuguggugguaucuuguacaaaauaggucugauccuagguauccauguugggggcaaugguagaaaugguuucucugcuauguuauuaaggucauauuucaaugaacaacagggucaaauaaugacuaaagcugauguuaaagagaaaaaccucuauagcauacauacucccacuaaaacaaaauugcaaccuaguauuuuucaugauguuuuuccuggaaagaaggaaccugcagucuuaucuucaaaagauccuaggcugcaaguagaccuggaagaagcaauauuuucaaaauacaagggaaauaaagaaauuaaaauaacucaaaacauggagguagcagcugcacauuaugcagcccaacucucaacucuaaacauaaacccagaaccgcuuacuauggaagaaaguguauaugguauagaaggauuggaagcuuuagauuuacacacuagugcaggauauccauauacagcauguggcauuaagaagaaagauuugauaccaaaagauagggacuuaaccaaguuuaaacaagcuuuggaaaaauauggcuuagauuuacccaugauuaccuuccuuaaagaugagcucagaaaaccugaaaaaauccuagcaggaaaaacuaggaucauagaagcuaguaguuugaaugacacaguacaauuuagaauggccuuugguagauuauuuucugccuuccaccaaaacccagguauagucacagguucagccguggguugugacccugaaguuuuuuggucaaaaauaccagucaugcuugauggugagugccuuauggcuuuugauuauucaaauuaugauggaagccuuaauccaguaugguuugaguuacuugcuaagguucuugaugaucuaggauuuccagguaaccuagucaggaaauuauguuauuccaaacacaucuucaagacucaauayuaugagguggaaggagggaugccaucagggugugcuggaaccaguauauuuaauaccauaauuaacaauauaauaaucagaacuuuaguacuagauacauauaaguaugugaauuuagauaaauugaaaauauuggcauauggugaugacauauuauuuucuuacccuuaugacuuggacaugaaagaauuagcagaugaggggucuaaauauggacuaacuauaacuccugcugauaaaucagauacuuuccaaaaacuugauuuuaguaaugcuacuuucuugaagaggggcuuuaaaccagaugaaaaacauagcuuccuaguacacccuaucuauccugaggaagaggugugggagucuauuagauggacaaagaaucccagaaauaugcaggagcauguguugucauugugccaucuuauguggcauaauggcaaaucuaaguaccaugaguuuguggccaagauaaggagcguuagcgcuggucgugcgcucuauauaccaccauuugaacucuugygccacgaaugguaugaaaaauuuuaaacagauauagaauuuauaaauaauuaguuuguagauuuuau

SEQ ID NO: 36 - RNA, 7216 nt, Human rhinovirus
uuaaaacagcggauggguaucccaccauccgacccacuggguguaguacycugguauuauguaccuuuguacgccuguuucucccucccuacuaccccgccucaagcauccuguaacuuagaagaauugaaaaaccgcacaacaggagcuauuacaaccaguaauaguuagugcaagcacuucuguuuccccggagcggaguauagacggccaccgcugucaaaagcucuuaaccguuauccgccaguuaacuacguaacggcuaguaacaucuuguugugcuuaggguguucgaucaggugaagaaaaacccccuucacuagucuggucgaugaggcugagaaguccccacgggcgaccgugucucagccugcguggcggccagcccagcauaugcugggacgccuuaaguaugacauggugugaagacccgcaugugcuuaacugugaguccuccggccccugaaugcggcuaaccuaaacccuggagccuuggagcacaagccagugcuuacaaggucguaaugagcaauuccgggacgggaccgacuacuuuggguguccguguuuccuuuuaucucauuauuguucuuaugguuacaauauauagaguauauuguaaucaugggugcacaagugucuacacagaagagugguucgcaugaaaaccaaaauauucuuacaaaugguucuacacaaaacuuuacugucaucaauuauuacaaagacgcagcaaguucgucaucugcuggucaaucuuuuucaauggaucccuccaaguuuacugaacccguuaaggauauaaugcucaagggagcaccagcuuuaaacuccccuaauguugaggcauguggauacagugacaggguacaacaaauuacacuuggcaauucaacaauuacaacccaagaagcagccaaugcaguuguggcauacgcugaauggcccaguuauuugucagauucugaugcaagugaugucaacaaaaccucacagccugacacuucuguuuguagguuuuacacacuagacagcaagacauggucagcaaauucaaaaggaugguguuggaagcuuccagaugcacuuaaagauaugggaguguuuggacaaaacauguuuuuccaugcacuagggagaacaggcuacaccguacauguucaauguaaugcaaccaaauuccacaguggcuguuuacugguaguagccauuccagaacaccagcuugcaucacacacacagggaaaugucucaguuaaguacaaguauacucauccaggugaaucagggauaaauuuggaugacacaccagaagcagggggggcgucacaugauccaguguacuccaugaauggaaccuuaguggguaaucuucucaucuuuccacaucaauuuauuaacuugagaaccaacaacaccgccacacuuaucuuacccuacauaaauucagugcccauggauuccaugacuagacauaacaauauaucuuuauuaguuaucccaauuguaccacugucaaguccaucaggaaugaccacuacaauuccagucacagucacuauugccccuauguacacugaauucucagguauuaggucaaaagcuguaauuaaacaaggucuacccaccuugaccacuccugguucuggucaauuucucacuacagaugauaggcaaucaccuagugcaaugccaaacuaugaaccaaccccacaaauccacauaccaggagaaguccacaaucuguuggaacuuauacaaguugauacauugauuccccugaauaaucuggguguuacagacaccaugagugaguaccgaauuccacucacugcagguagagugaaugaacaaauauucgguacuagauuguacauaggagaugguguuuucaagaccacuuuauuuggagaaauugcucaguacuucacucacuggucagguuccauccgaaucucccuaauguauacagguccugcacuauccagugccaaauugauuuuagcguacaccccaccaggagccggaggcccaaaagacaggaaagaagcaauguugggcacacauguagugugggauguagguuuacagucaacaguugucaugaacauaccauggacaagugguguacaauucagguauacagauccagacacauacacaagugccggguuucucucauguugguaucaaacaucuuugauccucccgccagaaacgucaggaacugucuacuuauuagccuuuguuagugcauguccagacuuuaaauugagacuaaugaaagauacccagacaauaucacagacagaagcacucacagaaggucuuggggaagagcuagaggaaguuguugucgacaaaaugagacagauaacagcuucaagucagagugguucaaagcacacucaaaaagugccagcuuuaagugcaagugagacaggugccacauugcccacaaauccaucugauaauguugaaacuagaaccacauacaugcauuucaauggcucagaaacuacauuagaaaacuuuuuagggagaucugcuuguguacacauaacagagauugaaaacaaaguaccccaagacccuacgccagaaggaggaaauacccacaaagaacaaaaacuauucaaugacuggaaaauaagcuuguccaguuugguacaacuuaggaaaaaguuagaacuuuuuacuuaugugagguuugacucugaguacaccauacuagccacugcuucucaaccugaggcugcugaauaugcuagcaaucugacaguacaggcaauguauguuccuccaggcgcaccaaacccuguuaaauggaaugauuacacguggcagagugcuucaaauccuaguguuuucuuugaaguuggcaaaacagccagguucagugugccauucauugguaucgccucagcuuauaacugcuuuuaugauggcuacucacaugaugacccagaaacacaguaugguauaaaugugcuaaaccacauggguagcauugccuuuagagugguaaaugaucaugacuuucacaaaacauuggugaagauaaggguauuccacagagcuaagcacauuagagcuuggguaccaagaccacccagagcacuaccauacacauccauugguagaaccaauuucccacugagccaugguaaaaucauugccaaaagagaaaagaucaccaccuauggugguagucccagauuuggagcuauuuacacauguaauuauaaaauaaugaacuaccauuugaugacucaagaagaccacuuaaaccucuugacuccuuacuacaacagggauuuggcaguuguugcaacuggagcucagggcucagaaaucauuccacauugcaauuguaccucagguguuuauuauucucaguacuacagaaaauacuaucccauaauaugugacaaacccacaaacaucuggauugaagguggcaguuacuacccuaguagauuucaaucagggguaaugaaggguguuggaccagcugaaccuggggacugugguggcaucuuacgaugcguacaugguccaauuggauuguuaacagcaggugggagugguuacguguguuuugcagauauuagacaacuagacuucaucgcagaaacacagggcauuacugauuacauaacaaaucugggaaaggcauuugguguaggcuuuacagaucaaaucucagcgaagguuaccgagcuccaggauaguguuaaagacuacauaaaugucaaaauuuuauccaaaguugucaaaaugguaucagcauuaguuauuauuuguagaaaucaugaugauuugguuacagucacugcuaccuuggcacuacucgggugugauggaucacccuggagauuucucaaaauguacauaucaaagcauuuccaggugcccuacauagagagacaagcaaaugauggcugguucagaaaauucaaugaugcuuguaaugcagcaaaaggucuggaauggauagcaaacaaaauuuccaaacuuauagaauggguaaagacaaagauaauuccucaagcaaaagaaaaacuagauuuuuguaagagacucaagcaguuggacaucuuagaaaggcaaauaacaacaaugcauguuucuaauccaacacaggagaaaagagagcagcuuuuuaacaauguuuuguggcuagaacaaaugucccagaaauuugccccguuguaugcaguagaagccaggagaauuaaagagaugaaaacaaaaaugaugaacuacauacaauucaaaucaaaacagagaaccgaaccaguuuguguuuugauucaugguucaccuggaucagguaagucacuaaccacauccauuauuggcagggcuauagcagaaagguucaaauccacagucuauucacuuccaccagacccaaaacacuuugaugguuaccaacagcaggaaguggugaucauggaugaucuaaaucaaaauccagauggccaggauaucaguauguucugucagaugguuucaucaguugacuucauaccaccuauggccaguuuagauaacaaagguaucuuguucacuagcaauuuuguucuugcaucaaccaacucaaacacacuaagcccuccaacaauccuaaacccagaagcacuggcuaggagguuuggauuugaucuggauaucugcuugcauaccacuuacacaaaaucaggaaagcuaaauguagcaauggcaacugaacuuuguaaagacugucauaaacccaguaacuucagcagguguugcccauugauauguggaaaagcuaucagucuuguagaccgauccacuaauguuagguauaguuuagaucaauuaguuacagcaauaauaacugauuauaauaauaaacuaaaaaucacugacucccuagagguucuguuucaaggaccuguuuacaaagaccuggaaauagauguccacaguacaccaccaccugagugcauuaaugaccuacucaaaucuguugauucugaggagcuuagggaauacugcaaacagaaaaauuggcuuaucccagaaauuccaacaaacauagaaagagcagugaaccaggcuagcaccauuauaaacacaauucuaauguuugugagcacucuugggauccuuuauguaauauacaagcuauuugcacaaacccaagguccguauucugguaaccccucacacacaaaacuaaagccaccaacacuacgacaagugguagugcaagguccaaauacugaauuugcuaugucccuucuuagaaagaauauagucacaguuacuaccacuaagggagaguucacagcauugggaauucaugauagagucugugugguacccacgcacucccagcccgaugaugaaguguugguuaauggacaaccagucaaauugaaggacaaauauaaauugauggacccagaaaauacuaaccuagaauuaaccauaauaguuuuggauagaaaugaaaaauuuagggacauaagagcauuuauagcagaagauccagagggaauggaagggacucuuguaauaaacuccaacaauuucaaagacaccauccuagaagugggccaguugacuuuugcuggucuaauaaauuugaguaguguuccaacaaaccgcaugauacgcuaugaguaccccacuagaacaggucagugcggugguguguugugcucgacuggcaagauauauggaauucauguuggcgggaaugggcggcaaggcuuuucugcacaacugaaaagacaguauuuuguggaaaaacaaggagcaaucaccacuaggaaaaaugucagggaaaugggacuaaaaccuauuaacaccccuaccaaaacaaagcuccaccccaguguguuuuaugagguauucccuggaucaaaggaaccugcuguuuugaaugacgcagaccccagguuggagguuaaccugcgugacucccuguuuucaaaauacagggggaauguugaaacugacaucacagagaacaugcagguggccauagaucaauauucaggucaguugcuaucacuagauaucucaacagaugaguugucacuuaaagaagccuuguaugguacagauggacuagaaccaauugacauaaacaccagugcuggcuacccguaugugagucuagggauuaaaaagaaagauauacuuaauagggaaacccaggacaccuccaagauggagcauuacuuagauaaauauggcauagauuuaccacuugucacauacaucaaggaugaacucagaggcaaggauaaaguuagauuagguaagaguagauugauagaagcgucuaguuugaaugacucuguaaauaugaggguaaaauuaggcaauuuauacaaggcuuuucauuuaaacccugguguaauaacuggaucagcugugggaugugacccggacacauucuggucugucauacccugccucauggaugggcaacucauggcguuugauuacucaaacuucgacgccucacuauccccaguaugguucaaaugucuugagcaggugcuugcuaaacuuggauuuaaacauucuaaucuuauaagaacaauuugcaacacucaucacaucuucagggaugagauuuaugaaguugaaggaggaaugccaucuggguguucaggcacaagugucuucaauucaaugauaaacaacauaaucauuagaacauuaauauuagauguuuacaaagguauugaucuugacaagcugaaagugauugcuuauggugaugaucuuauuguuuccuacccauuugaauuacaaccagaguugcuagcuucugcuggcaagaaauauggccugacaaucacacccccagauaagucagaaaaauuuacaaaaacaacaugggaaaauguaaccuuuuuaaagagguauuuuaggccugacccacaauauccuuuucucauacacccagugaugccaaugcaagacauucaugaguccauucguuggacacgcgaucccaaaaacacacaggaucacguacgaucuuuaugcauguuagcuuggcauucuggagaagaagaauacaagaacuuuacugagaaaaucagaucaaccagcauuggcaaaugcuuguuaaucccagaguacagugucuuacgccgacgcugguuagaucuguucuaaauaauauagauuuauaauuugauuagaauuagaaauuuau

SEQ ID NO: 37 - RNA, 7216 nt, Human rhinovirus
uuaaaacagcggauggguaucccaccauccgacccacuggguguaguacucugguauuauguaccuuuguacgccuguuucucccccccauuaccccuccccacauaucccaguaacuuagaagaauuaaauuaucgcacaauaggagcuauuacaaccaguaauaguuagugcaaguacuucuguuuccccggagcggaguauagauggccaccgcugucaaaagcucuuaaccguuauccgccaguuaacuacguaacggcuaguaacaucuuguugugcuuaagguguucgaucaggugaagagacacccccuucacuagucuggucgaugaggcugagaaauccccacgggcgaccgugucucagccugcguggcggccagcccagcuuaugcugggacgccuuaaguaugacauggugugaagacccgcaugugcuuaacugugaguccuccggccccugaaugcggcuaaccuuaacccuggagccuugggguacaauccagugcuaacaaggucguaacgagcaauuccgggacgggaccgacuacuuuggguguccguguuuccuuuuauuucauuauuguucuuaugguuacaauauauagaguauauuguaaucaugggugcacaagugucuacacaaaagagugguucgcacgaaaaucaaaacauucucacaaacggcucuacacagaacuuuacuguuaucaauuauuauaaggaugcagcaagcucaucaucugcuggucaaucuuuuucaauggacccuucuaaguuuacugaaccuguuaaagauauaaugcucaaaggugcaccagcuuugaauucucccaacgucgaggcauguggauauagugauagggugcaacaaauuacacuuggaaacucaacaaucacaacccaagaggcagcuaaugcaguuguugcauaugcugaauggcccagcuauuugucagauucugaugcaagugaugucaacaaaaccucccagcccgacacaucuguuuguagguuuuauacauuggacagcaagacauggucagcuaacucaaaagggugguguuggaagcuuccagaugcacuuaaggauaugggaguguuugggcaaaacauguuuuuucaugcacuagggagaacaggcuauaccgugcauguucaguguaacgcaacuaaauuccauagugguugccuacuaguaguagccaucccggaacaccaauuagcaucacauacacaggggaauguaucaguuaaauacaaauacacccacccaggcgaacaggggauaaauuugaaugauauaccagaagaaggaggagcaucacaugacccaguauauucuaugaauggaacccuaguggguaaccuucucaucuucccacaccaguucauuaacuuaagaaccaacaauaccgccacacucauuuuacccuauauaaacucaguaccuauggauucuaugaccagacauaacaauauauccuuguuagucauuccaauuguaccacugucaaauccaacaggaaugacuacuacaaucccaguuacagugacuauugcucccauguauacugaauuuucaggcaucagaucaaaagcuguggugccacaaggucuacccaccuugacuaccccuggaucaggucaauuuuuaacuacagaugauagacaaucaccuagugcaaugccaaauuaugagccaaccccacaaauucacauaccaggagagguucacaacuugcuagagcuuauacaaguagauacauugauuccuuugaacaauuuggguacuacagacucuaugagugaguaucggauuccacuuacggcagguaaagugaacgagcaaauauuugguaccagauuguauauaggagauggugucuucaagaccacuuuguuuggggaaaucgcccaguacuucacucauuggucagguuccaucagaauuucauuaauguauacaggccccgcauuguccagugccaaguugaucuuagcguacacuccaccaggaucuggggguccaaaggacagaaaggaagcaauguugggcacucauguagugugggauguagguuuacagucaacaguugucaugaauauaccauggacaagugguguacaauuuagguuuacagauccugauaccuacaccagugcuggguuucuuucaugcugguaccaaacuucuuugauucuuccaccagaaacaucaggaacugucuaccuguuagcuuuuguuagugcauguccagauuuuaaauugagauuaaugaaagacacccaaacaauaucacagacagaagcacuuacagaaggauuuggggaggaacuggaggaaguuguugucgacaaaaugagacagauaacagcuucaagucagagcgguccaaaacauacucaaaaaguaccagcauuaagugcaagugaaacaggugcuacauuaccaacaaauccaucugauaauguugaaacuagaaccacauacaugcacuucacuggcucagaaacuacauuggagaauuuucuaggaagguccgccuguguacauauaacagagauugagaacgaaauaccucaaaaucccacaccggaagggacaaauacccacaaggaacaaaaauuguucagugauuggaaagugaacuuauccagucuagugcagcuuagaaagaaacuggaacuuuuuaccuaugugagauuugacucugaguacacuauacuggccacugcuucccaaccagaaacugcccaauaugcuagcaaucuaacaguacaagcaauguauguuccuccaggugcaccaaacccuguugaauggaaugauuacacauggcagagugcuucaaauccuaguguuuucuuugaaguugguaaaacagcuagauuuagugugccguuuguugguauugcuucagccuacaacugcuucuacgaugguuauucacaugaugaugcaaacacacaauauggcauaaaugugcuaaaucacauggguaguauugccuuuaggguaguaaaugaccaugaccuccacaaaacacuagugaaaauaaggguguuucacagggcuaaacacaucagagcuuggguaccgcgaccacccagagcacuaccguauacaucuaucgguagaaccaacuuuccacuaaaucauggcaaaauuauugccaaaagagacaagaucacaacuuauggugguaauuccagauuuggagcuguuuacacuuguaauuacaaaauaaugaauuaccauuugaugacacaggaagaucacuuaaaccuccuaacuccuuauuacaacagagauuuagcaguuguagcaaccggagcacagggcucagaaauuauuccacauuguaauugcacuucagguguuuacuacucccaguacuacaggaaauauuauccaauaauaugugagaaacccacaaacauuuggauugaaggugguaguuauuaucccaguagauuucaaucaggagugaugaagggaguugggccagcugaacccggagauugugguggcaucuuacgaugcaugcaugguccaauuggccuguuaacagcaggcgggagugguuaugugugcuuugcagacauuagacaauuagacuucauugcugaaacacaggguaucacugacuauauaacaaaucuaggaaaagcauuuggugugggcuuuacagaucaaauaucagcaaagguuacugagcuucaagauaguguuaaagauuacauaaaugucaaaauucuauccaaaguugucaaaaugguaucagcauuaguuauuauuuguagaaaucaugaugacuugguuacagucacugccacuuuggcacuacuugggugugacggaucacccuggagauuccucaaaauguacauaucaaaacacuuccaagugccuuacauagagagacaagcaaaugacggcugguucagaaaguucaacgaugcuuguaaugcagcaaaagguuuagaguggauagcaaacaaaauuuccaagcuuauagaaugggugaagacaaagauaauuccucaggcaagagaaaagcuggauuuuugcaagagacucaaacaacuggacauucuagaaagacagauagcaacaaugcauguuucuaauccaacacaagagaaaagagagcaacucuuuaauaauguucugugguuggaacaaaugucccagaaguucgcaccacuguacgcaguggaagccaggagaaucaaggagaugaagacaaaagugaugaacuauauacaguucaaguccaagcagagaaccgaaccggucuguguucuaauucauggcuccccuggaucaggaaagucacuaacuacauccaucauuggcagagcuauagcugaaagguuuaaauccacgguuuauucacucccaccagauccaaaacacuucgauggauaccaacaacaggagguggugauaauggaugaccugaaccaaaacccagauggccaagauaucaguauguuuugccagaugguuucaucaguugacuuuauaccaccgauggccagcuuggacaauaaaggcauucuguuuacuagcaacuuuguucuugcaucaaccaacucaaacacacuaagucccccaacaauuuugaacccggaagcauuggccaggagauuuggguuugaucuagacauuugcuugcacaccacuuacacaaaaucaggaaaauuaaaugcagcaauggcaacugaacuuugcaaggauugucacaaacccagcaauuucaguaaguguuguccacuaauaugugggaaagccguuagucuuguggaucgauccaccaauguuagauauaguuuagaucaauuagucacagcaauuauaacugacuacaacaauaaauuaaagaucacugacuccuuggaaguucuguuucagggaccuguuuauaaagacuuagaaauagauguccacagcacacccccaccugaguguauuaaugaccuacuuaaaucuguugauucuaaagagcucagagaguauugcaagcagaaaaacuggcuuaucccagaaauuccaacaaauauagagagagcaguaaaccaggcuaguacuaucaucaacacaauuuugauguuugugaguacccuugggauccuuuauguaauauauaaacuguuugcacaaacacaggguccguacucaggcaauccuucacacacaaaacuaaaaccaccaacauuacgacaggugguggugcaagguccaaauacugaguuugcuaugucucuccuuagaaagaacauagucacaguuaccaccaccaaaggagaauucacagcauuaggcauucaugauagaguuugugugguacccacgcacucccaaccugaugaugaaguguuaguuaaugggcaaccaguuaaguugaaggacaaguauaaauugauggauccagaaaacacuaaccuagaguugacuauaauaguucuagacagaaaugaaaaauuuagggacauaagagcauuuauagcagaagacccagagggaauggaaggaacucuuguaauaaauuccaacaauuuuaaagacaccauucuggagguggggcaguugacuuuugcuggccuaauaaaccugaguaguguuccaacaaaccgcaugauacgcuacgaguacccuaccaggacaggacaaugugguggcgugcugugcucaacuggcaagauauacggaauucaugucgguggaaauggacgacaggguuuuucugcacaauugaaaaagcaauauuuuguggagaaacagggggcaaucaccaccaggaaaaauguuagggaagugggauugaaaccuaucaacacucccacuaagacaaagcuucacccuaguguguuucaugaaauauucccuggaucaaaggaaccugcuguguuaaacgacacugaccccagguuagagguuaaccugugugacucccuauuuucaaaauacaagggaaauguugaaauugauaucacagaaaacaugcagguggccauagaucaauacucaggucaguuguugucucuagacaucccaacagaagaguugucacuuaaggaagcuuuguauggcacagauggguuagaaccaauugauauaaacacuagugcugguuacccguauguaaguuuaggaauaaagaagaaagacauacucaauagggaaacccaggauaccuccaaaauggaacauuacuuagauaaguaugguauagacuugccacuugucacauacaucaaagaugaacuuagagguagggauaagguuagauuaggcaaaagcagacugauugaagcauccagcuugaaugacucuguaaacaugagagugaaauuagguaauuuguacaaggcuuuccauucaaaccccggagugauaacuggaucagcugugggaugugacccagauacguucuggucugucauaccgugucucauggacgggcaacucauggcauuugacuacucaaauuuugaugcuucacuauccccaguaugguucaggugucuugagcagguacuugccaagcuuggauucagacacucuaaccucauaaaaacaauuugcaacacacaccacauauuuagggaugaaaucuaugaaguugagggaggaaugccaucuggguguucaggcacaagugucuucaauucaaugauaaacaauauaaucauuagaacauuaauauuagauguuuauaaaggcauugaucuugacaaauuaaaagugauugcuuauggugaugaccuuauuguuuccuacccauuugagcugcaaccagaacuacuagcuucugcugguaagaaauacggcuugacaauuacaccuccagacaaaucagaaaaguuuacaaaaacaacaugggaaaauguaacuuuccugaaaagguauuucaggccugauccacaauauccuuuucucauacacccagugaugccaaugcaggauauuuaugaguccauucgcuggacucgcgauccuaaaaauacacaggaucauauacgauccuuguguauguuggccuggcauucuggagaggaggaguauaaaaacuucauugagaagaucagaucaaccagcauugguaaaugcuuguuaauuccagaauacagugucuugcgccgacgcugguuagaucuguuuuaaauaauauagauuugcaauuugauuagaauuagaaauuuau

SEQ ID NO: 38 - RNA, 7133 nt, Human rhinovirus
uuaaaacuggaucuagguuguucccaccuagaucuccuacauggaguuguacucuauuauuccgguaauuuuguacgccaguuuuauaucccuacccccauguaacuuagaaguuaagcacaacgaccaauaggaggcaauugaccaaauugcuaaaggucaagcacuucuguuuccccggucaagauugauacgcuccaccagggcgaaaacaauugagaucguuauccgcaaagugccuacgcgaagccuaguaacacuuugaagaguuuaugguuggucgcuccgcuauuccccauagcagaccuggcagaugaggcuagaagcuccccacuggugacaguguucuagccugcguggcugccugcacacccuuaugggugugaagccauauacuugacagggugugaagagccuagugugcucacuuugaguccuccggccccugaauguggcuaaccuuaaacccguagcuagugcacacaauccaguguguggcuagucguaaugagcaauuacgggaugggaccaacuacuuuggguguccguguuucacuuuuuccuuuuguauuugcuuauggugacaauauauagauuauauauugacaccaugggcgcucagguaucuagacagaauguugguacucacucaacucaaaacucugugucaaauggauccagcuugaauuauuucaauauaaauuauuuuaaagaugcugcuucaaguggagcguccaaauuggaauucucacaagauccaaguaaguuuacugacccaguaaaagauguucuggaaaaagggauaccaacuuuacaaucacccacaguggaggcuuguggcuacucagauaggauuauacaaauaacuagaggagauucaacaauaacaucacaagauguggcaaaugccguugugggauauggugucuggccacauuauuuaacagcacaggaugccacagccauagauaaaccuacacaaccugacacaucauccaacagauuuuacacacuugacaguaaauugugggacgagacaucaaaaggcuggugguggaaguugccugaugcacucaaagacaugggcauauuuggugagaauauguuuuaccauuuccuugggagaucaggauacacuguacauguacaguguaaugcaaguaaauuucaucaagguacacugcuaaucgccaugguaccagaacaucaauuagccagcgcaagucguggcaaugucacugcaggauauaauuauacacacccuggugaacuugguagaguaguugggcaaccuaggacacagauuaaugaucaccaaccuagugaugacaacugguuaaauuuugaugguacuuuccuuggaaaucuguuaauauucccacaccaauuuauuaauuuaagaagcaauaauucagcaacaaucauuguuccauaugugaaugcagugccaauggacucaaugcuaagacauaacaauuggaguuuguuaauuaucccugugaguucucugaaaagcgaucaggcaucuguuagagugccaauaacaauuucaauuaguccaaugugugcugaauucucuggugccagagcaagaccagcugcugcagcacaagguuugccgguuuauauuacaccaggaucuggacaguucaugacuacagaugauuuacaauccccaugugcucuaccaugguaccacccgacuaaggaaauuuucauaccuggugagguuagaaaccuuauugagaugugccaagucgacacacucaucccaauuaauaacacacuuccaaaccuucguaauguuaguaaguaugcuguuucacugucuagucaaacugauuuugcuaaggaaauauuugcuauuaaaguggauguagcuucccaaccucuuucaaguacacuuuuaggugaaauauguaguuauuacacacacuggacagguaguuuacguuuuagcuucauguucugugguacagccaauacaacgcuuaaggugcucauugcuuacacaccaccagggaucaagaaaccugaaaccagaaagcaagccaugcuggguacacauauagugugggauguggggcuacaaucgacuguuucucugguugucccuuggguuagugcuagccacuucagauacacaacuccagauacauacucugcagcaggguacauaacuuguugguaucaaacaaacuuuguauuuccaccuaauacaccuaauaaugcugacauguuguguuuugugucugcuuguaaagacuuuugcuuacgcauggcuagagacacugacaugcacgugcaaaaugugccaauagagcaaaauccuguagaaaaguauguugaugaaguguuaaaugaaguauuaguuguuccaaacaucagagaaagucauccagcuacauccaauucagccccugcguuggaugcggcagaaacuggacauacuaguggaauacaaccugaggacacuauagaaacaagauacguacagacuucacaaaccagagaugaaaugagcauagagagcuuuuuagguagagcugguugcauacaugaauccaccaucacaauucggaaugauguugaauacaaugaucaucacuucaagaaaugggacauaacauuacaagaaauggcacaaauacggagaaaauuugaauucuuuacuuauguuagguuugauucagaaauuacucuagucccuuguauagcugguaagggagcugauauugggcauauugucaugcaauucauguauguaccaccuggugcaccaaaaccagagaaaaggaaugauuacaccugggagucaaguacaaacccuucuauauuuuggcaacauggucaagcuuauccaagauucucuuuacccuucuuaagcauugcaucugcuuacuacauguucuaugaugguuaugauggugaugcaccagggucaagguaugggaccucagucaccaaccacauggguacauugugcucaagagugguuacugguaaacaagaacauccaguugagaucacuacaagaguguaucauaaagcaaaacacauuagagcaugguguccacgugcaccuagggcugucccauacacacauacuagaucaacaaauuacaugccacaggauggugaaccaacaauuuuccuuaagcacagggaaacucuuacaacagcuggacccagugacauguauguacaugucgguaauuuaauauacaggaaucuacaucuuuucaauucugaaaugcaugacucuauucugauuucuuacucuucugauuuagucauauaccgcacaaacacaauaggagaugacuauauuccaacaugugauugcacagaagccacauauuacuguaagcacaagaauagauauuacccaauuaaaguaacuagucaugauugguaugaaauacaagaaagugaauauuacccuaaacacauucaauauaaccuuuugauuggagaaggaccaugugaaccaggagacuguggaggcaaauuacuguguaaacauggggucaucggaauaaucacugcugguggagaaggacauguggcauuuauugaucuuagacauuuccauugugccgaagagcaaggcauaacugacuacauccacaugcuuggugaagccuuugguacagguuuuguugauaguguuaaggaucaaauaaaugcuaucaacccaaucaauaauauuaguaagaaaauaauuaaauggcuccuuagaaucauaucagcuaugguaauaauaaucagaaauucaucagauccacagacaauuauagccacuuuaacuuuaauugguuguucagguucaccauggagauuuuugaaggagaaauucugcaaauggacucaacuuaacuacauccacaaggagucugauucguggcucaaaaaauuuacagaaaugugcaaugcagcaagaggauuagaguggauuggcaauaagauaucuaaauuuauugauuggaugaaaucuaugcuaccacaagcucagcuuaaaauaaaauacuugagugagcuaaagaaauugaaucuccuggaaaagcagauggaacaccuuagaguugcggauucucaaacacaggagaaaauuaaacaugaaaucgacacucuucaugaccuuucaugcaaauuucuuccauuauaugcaagugaagcaaagagaauuaaaauuuuacacaauagguguaguacuauuauuaagcaaaagaaaaggugugagccuguugccguuguaauacauggugaaccagguacaggaaaaucuaugaccacaaacuuccuagcuagaaugauaaccaaugauagugauauauauucuuuaccuccagauccuaaauauuuugauggauaugaucaacaaaguguggucaucauggaugacgugaugcaaaauccaaguggagaugauaugacucuauuuugucagauggucucuagugucacuuuuauaccaccuauggcugauuuaccagauaagggaaaaccuuuugauucuagauuuguguuauguaguacuaaucauaauuuacuggcaccucccacaauaacuucuuuaccagcuaugaacaggagauucuuucuugaucuagauauaguggugugugauaaauauaaagauucacaaggaaaauuaaaugugucugcugcuuuuaaaccaugugauguuaacacaaaaauuggaaaugccaagugcugccccuucauauguggcaaggcugucauguucagggauagaaauacaugucaaaccuauacacuaucucaagucuauaaucaaauacuugaugaagauaaaaggcguagacagguuguugacgugauggcagcaauauuucaaggcccaauuucacuugaaggaccaccaccagcagcaauaagugaccuuuugcaaucaguuagaaccccagaggugaucaaguauugugaagacaauaaauggauaauaccagcagagugcaagauagagagagaucugaauuuggcaaacaccauuaucacaaucauugcaaauauuauuaguauuucagguauaauuuaugugauauacaaacucuuuuguacacuucaagguccauauucaggugaacccaaacccaaaaccaaagugccagaaagaagaguaguagcacaagguccugaagaagaauuugguagaucacuuauuaaacacaacucauguguggucaccacuucaaaugguaaauuuacagguuuaggaauuuaugauagaacauugauuguacccacacaugcagauccagguaaagaaguacaaauagauggcaucacaacugagguccaagauucuuaugauuuguauaacaaagaugguauaaaauuggaaauuacaguucuuaaacuuaaaagaaaugagaaauucaaggacauuaggaaguauauuccagaaaaugaagaugauuauccagauuguaauuuggcuuuaucugccaaccaaccagaaacuacaauuauuaauguuggagauguaguaucauaugggaacauuuuacucaguggaaaucaaacagcaagaaugcucaaauacaacuacccaacaaaaucaggguauuguggugggauacuauacaaaauugggcaagucuugggcauucauguugguggcaauggaagggauggauuugcagcuaugcuauuaagaucauacuuuacagaggcacaaggucaaauaguuaccacuaaaucuaccauagaguguaaccuaccuagcauucauacaccuaguaaaaccaaauuacaacccaguguauuuuaugaugucuuccccgggaguaaagagccagcugugcucucagaacaugauccuagauuagaaguugauuuuaaacaagcuuuguuuucaaaguauaaaggcaauaaucagugugaaauaaaugagcacaucaaaguggcagcaucccacuauucagcacaguuaaugacauuggacauugauucaaauccaauuucacuagaagauaguguguucggcacagagggccuagaagcacuugaucucaccacuagugcuggauuuccuuaugugucuauggguaucaagaaaagagauuugauuaacaaacaaacaaaagacaucaccaagcuuaagauagcucuagauaaauaugguguugaucugcccauggucacauuucuuaaagaugaacuuaggaaaaaagaaaagauucacacuggaaagacacguguuauugaggcuaguaguguaaaugacacuguguuauuuagaacaaccuuuggaaaucuuuuuucaaaauuucauuugaauccuggcauugucacugguuccgcaguggggugugauccagagaccuuuuggucaaaaauaccagugauguuagauggugaaugcauaauggcauuugauuacacaaacuaugaugguagcauacauccaauaugguuccaggcucuuaaagaaguacuauccaacuuaggguuccaacccaauuuaauagauagauugugcaaaucuaaacauauuuuuaaaaauguguauuaugaaguugaaggggggguaccaucagguuguucugggacaaguauauucaacacaaugauuaacaauaucaucauuagaacacuagugcuggaugcauauaaaaauauugaucuggacaagcucaaaauaauagcuuauggggaugaugucaucuuuuccuauaaauaucaauuagauauggaagcaauugcuaaagaagguguuaaauauggucuaacuauaaccccagcugauaaaucaagugaauuuaagaaauuagauuauagcaauguaacuuuucuuaaaagaggguucaagcaggaugaaagauauucauuuuuaauacauccaacuuuuccagucaaugaaauucaagaguccauacgauggacaaagaaaccaucucagaugcaggagcauguucuaucacugugucacuuaauguggcauaaugguagggauguguauaagcaauuugaacagaagauacgcaguguuagcgcuggccgugcacuguacauuccuccuuaugaucugcuucugcaugagugguaugaaaaauuuuaaauuguuuagauauagaaauaauaaacaguuaguuuuuuaguuuuau

SEQ ID NO: 39 - RNA, 7134 nt, Human rhinovirus
uuaaaacugggucuagguuguucccaccuagaccuccuacauggaguuguacucuauuauuucgguaauuuuguacgccaguuuuauauccccuuuccccacguaacuuagaaguuuaacacacugaccaauagguggcaauuaaccaaauugcuaaaggucaagcacuucuguuuccccggucaagauugauacgcucuaccagggcgaaaacaauugagaucguuamccgcaaagugccuacgcgaagccuaguaacaucuugaagaauuuaugguuggucgcuccacuauuccccauaguagaccuggcagaugaggcuagaaauuccccacuggcgacaguguucuagccugcguggcugccugcacacccuuacgggugugaagccauauauuugacaaggugugaagagccuagugugcucacuuugaguccuccggccccugaauguggcuaaccuuaaacccguagcuagugcauacaauccaguguguggcuagucguaacgagcaauuacgggaugggaccaacuacuuuggguguccguguuucacuuuuuccuuuuauauuugcuuauggugacaauauauagauuauauauugacaccaugggugcucaaguaucuagacagaauguugguacucauucaacucagaacucugugucaaauggaucuaguuugaauuauuuuaauauaaauuauuucaaggaugcugcuucaaguggagcaucaaaauuagaauuuucacaagauccaaguaaauuuacagacccaguaaaggauguuuuggagaaagggauaccaacuuuacaaucacccacaguggaagcuugugguuacucagacaggauuauacaaauaaccagaggagauucaacaaugacaucacaagauguagcaaaugcuguugugggauacggcgucuggccacauuacuuaacagcacaagaugcuacagcuauagauaaaccuacacaaccugacacaucuucuaacagauuuuauacacuugaaagcaaauuaugggaugagacaucaaaaggcuggugguggaaauuaccugaugcacuuaaagauauggguauauuuggugagaauauguucuaucauuuccuugggagaucaggauacacugugcauguacaguguaaugcaaguaaauuccaucaaggcacauuauugguugcuaugguaccagaacaucaacuagcuagugcaagucgugguaaugucacugcaggguauaauuacacacaccccggagaacucgguagaguaguugggcaagcuagaguccagaccaaugauaaucaaccuagugaugacaacugguuaaauuuugaugguacuuuucuuggaaacuuguuaauauucccacaccaauucauuaauuugagaacuaacaacucagcaacaaucauuguuccauauguaaaugcaguacccauggacucaauguugagacauaacaauuggaguuuguugauuauuccugugagcccucugaaaagugaccaagcaucuguuagagugccaauaacaauuucaauuaguccaaugugugccgaauucucuggcgccagagcaagaccagcugccgcagcacaggguuuaccaguuuauguuacaccaggaucuggacaauucaugacuacagaugacuugcaauccccaugugcuuugccaugguaucacccaaccaaagaaauuuucauaccuggcgagguuagaaaccucauugaaaugugucaaguugauacacucauuccaauuaauaacacauuugcaaaucuucguaauguuaacaaguaugcugucucauuguuuagccaaacugauuuugccaaggaaauauuugccauuaagguagauguagcuucucaaccucuuucaaguacacuccugggugaaauauguaguuauuacacacacuggacagguaguuugcguuuuaguuucauguuuugugguacggcuaacacaacacucaaggugcucauugcuuacacaccaccagggaucaagaaaccugaaaccaggaaacaagccaugcuggguacacauauaguaugggaugugggauuacaaucaacuguuucuuuaguugucccuuggguuagugcuagucauuuuagauacacaacuccagauacauacucugcagcaggguauauaacuuguugguaccaaacaaauuucguguuuccaccuaacacaccaaauagcgcugauauguugugcuuugugucugcuuguaaagacuucugcuuacguauggcuagggacacugacaugcaugugcaaaaugugccaauagaacaaaauccuguagaaagauauguugaugaaguguuaaaugaaguguuaguugucccaaacauuagagaaagucauccagcuacaucuaauucagccccugcgcuagaugcggcagaaacuggacacacuaguggaauacaacccgaggacaccauagaaacaagauuugugcagacaucacaaacuagagaugaaaugagcauagaaaguuuucuaggcagggcugguugcauacaugaauccaccauuacaauucaaaaugauguagaauacaaugaucaccauuuuaagaaaugggauauaacauuacaagagauggcacaaauacgaaggaaauuugaauucuuuacuuauguuagguuugauucagaaauuacucuaguccccuguauagcugguaagggaguugauauuggacacauugucaugcaauucauguauguaccgccuggugcaccaaaaccagaaaaaaggaaugauuacaccugggagucaagcacaaacccuucuauauuuuggcaacauggccaagcuuauccaagauucucuuuaccauuuuuaaguauugcaucugcuuacuacauguuuuaugauggguaugauggugacgcaccuggaucaagauaugggacuucaguuaccaaucauauggguacuuuguguucaagagugguuacugguaaacaaaaacacccaguugaaaucaccacacggguguaucacaaggcaaaacacauuagagcaugguguccacgugcaccuagggcugucccauacacacauacuagaucaacaaauuacaugccacgggagggugauccaacaauuuuccuuaaacacaggacaaaccuuguaacagcuggaccaagugacauguaugugcauguugguaauuuaauauacagaaacuuacaucuuuucaauucugaaaugcaugauucuauucugguuucuuacucuucugacuuagucauauaccgcacaaacacaauaggagaugacuauaucccaacaugugauuguacagaagcuacauacuacuguaagcauaagaauagauauuauccaauuaaaguaacuagccaugauugguaugaaauacaggaaagugaauauuaucccaaacauauacaauacaaccucuugauuggagaagggccaugugaaccaggagacuguggagggaaauuacuauguaaacaugggguuauuggaauaaucacugcugguggagaagggcauguggcauuuauugaucuuagacauuuccacugugcugaagaacaagguauaacugauuauauccacaugcuuggugaggccuuuggcacagguuuuguugauagcgucaaggaucaaauaaacgcuauuaaccccaucaauagcaucagcaagaaagugauuaaauggcuccuuagaaucauaucagcuauggugauaauuauuagaaacucaucagauccacagacaaucauagccacauugaccuuaauugguugcucagguucaccuuggagauuucuuaaagagaaguuuugcaaauggacucaacucaacuacauucacaaagagucugauucauggcucaaaaaauucacagaaauguguaaugcagcaaggggauuagaguggauuggcaauaaaauaucuaaauuuauugauuggaugaaaucuauguuaccacaagcucaacuuaagauaaaauacuugagugagcuuaaaaaauuaaauuuccuugaaaagcaaauggagcaucucaggguugcagauucgcaaacacaagagaagauuaaacaugaaauugauacucuucaugaucuuucaugcaaauuucuuccacuguaugcaagugaagcaaagaggauuaaagucuuauacaauagauguaguaccauuaucaagcaaaagaaaaggugugagcccguugcugucguaauacauggcgaaccggguacggguaaaucuaugacuacaaacuuccuagcuagaaugauaaccaaugacagugauauauauucuuuaccuccagaucccaaauauuuugauggauaugaucaacaaagugugguuaucauggaugauguaaugcaaaauccaaguggagaugacaugacucuguuuugccaaauggucucuagugucacauuuauaccaccuauggcugaucugccagauaagggaaaaccuuuugauucuagauuuguguugugcaguacuaaucacaauuuauuggcacccccuacaauaaccucuuuaccagcuaugaacaggagauucuuucuugauuuagacauaguagugugugacaaauacaaagauucacaagggaaacuaaacgugucugcugccuucaaaccaugugauguuaacacaaaaauuggaaaugccaaauguugcccuuuuauaugugggaaagcugucguuuucagagacagaaacacaugccaaaccuacacgcuaucucaaguauacaaucaaauacuugaugaagauaaaaggcguagacagguuguugaugugauggcagcaauauuucaagguccaauuucacuugaaggaccaccaccagcagcaauaagugaucuuuugcagucaguuagaacuccagaaguaauuaaauacugugaauauaauaaauggauaauaccagcagaguguaaaauagagagagacuugaacuuagcaaauaccauuauuacaaucauugcaaauauuauuaguauuucaggcauaaucuauguaauauacaaacucuuuuguacacuucaggguccauauucaggugaacccaaaccuaaaaccaaagugccagaaagaaggguaguggcacaagguccugaggaagaauuuggcagaucacuuauuaaacauaacucaugugugguuacuacuucaaaugguaaauuuacagguuuggggauuuaugauagaacauugauugugcccacacaugcagauccaggcaaagaggugcaaauagauggcaucacaacugagguacaagacucuuaugaucuguacaauagagaugguauaaaauuggaaauuacaguccuuaaacuuaaaagaaaugagaaauucaaagacauuaggaaauauauuccagaaaaugaggaugauuauccagauuguaauuuggcuuuaucugcuaaccaaccagaaacuacaauuauuaauguuggagauguggugucauauggaaacauuuugcucaguggaaaucaaacagcaagaaugcucaaauacaauuacccaacaaaaucaggauauuguggugggauucucuacaagauuggucaagucuuggguauucauguugguggcaaugggaaggauggguuugcagcuaugcuauuaagaucauacuuuacagaagcacaaggucaaauagucaccaccaaaccuacuauagaguguaaucuaccuaguauccauacaccuagcaaaaccaaauuacagccuaguguauuuuaugauguuuucccugguaguaaagagccagcuguacuuucagaacaugauccuagacuagagguugauuuuaaacaagcucuauuuucaaaguauaaagguaacaaucagugugaaaugaaugaacauauuaaaguggcagcaucccacuauucagcacaauuaaugacauuggauaucgauucaaauccaauuucacuagaagauagugucuucgguacagagggucuggaagcacuugaccuuaccaccagugcuggguuuccuuauguaucuauggguauuaagaaaagggauuuaaucaauaaacaaacaaaagacaucacuaagcuuaagauggcucuggacaaguaugguguugaucuaccuauggucacauuccuuaaagaugaacucaggaaaaaagagaaaauuucugcugggaagacacgugucaucgaagccaguaguguaaaugacacuguguuauuuaggacaaccuuuggaaaucucuuuucaaaauuucacuugaauccugguauugucacugguucugcaguggggugugauccagagaccuuuuggucaaaaauaccagugauguuagauggugaaugcauaauggcauuugauuauacaaauuaugaugguagcauacauccgaucugguuccaggcucucaaagaagugcuaucuaacuuaggguuccaauccaacuuaauagauagauuguguaaaucaaaacauaucuucaaaaauguguacuaugaaguugaggggggagugccaucagguuguucuggaacaaguauauuuaacacaaugaucaacaauauuaucauuagaacacugguuuuagaugcauacaaaaacauugaucuggauaaacucaaaauaauagcuuauggagaugaugucaucuuuuccuauaaauaucagcuagacauggaggcaauagcuaaagaagguguuaaguauggucuaacuauaaccccagcugauaaaucaagugaauucaaaaaauuagauuacagcaaugugaccuuucuaaaaagaggauucaagcaggaugacagauauucauuucuaauacauccaaccuuuccagucaaugaaauucaagaguccauacgauggacaaagaaaccaucucagaugcaggaacacguucuaucgcugugucacuuaauguggcauaauggcaaggauguguauaagcaauucgaacagaagauacgcaguguuggcgcuggucgcgcacuguauauuccucccuaugaucugcuucugcaugagugguaugaaaaguuuuaaauuguuuagauauagaaguaauaaacaauuaguuuuuuaguuuuau

SEQ ID NO: 40 - RNA, 7136 nt, Human rhinovirus
uuaaaacugrguucagguuguucccaccuggacuuccuauguggaguuguacacuguuaucccgguaaccuuguacgccaguuuuauacacccuucccuguaacuuagaaguuauaagcacgaggaccaauagguagugacuuuccaggucacuaaaggucaagcacuucugucuccccggucaaaguugauaugcucuccccagggcaaaaacaauugagaucguuauccgcaaugugccuacgcaaagccuaguaauaucuuagaugauauaugguuggucgcuccgccauuucccaugguagaccuggcagaugaggcuagaaacuccccacuggcgacaguguucuagccugcguggcugccugcgcacucucugagugcgaagccauauauuugacaaggugugaaragccccgugugcucacauugaauccuccggccccugaauguggcuaaccuuaaaccugcagcuagugcacacaaaccaguguguagcuagucguaacgagcaauugcgggaugggaccaacuacuuuggguguccguguuucacuuuuuuccuuuuauauuugcuuauggugacaauauauauaauacauauauugacaccaugggcgcucaaguaucuagacaaaauguugguacacacuccacucaaaacacaguuucaaauggaucuagucuaaauuauuucaacaucaauuauuuuaaggaugcugcuucuagcggugcauccaaauuggaauuuucacaagauccaagcaaguucacugacccaguuaaagaugucuuggagaaaggaauacccacucugcaaucuccaacuguagaagcuugugguuauucagacagaauuauacaaaucacuagaggagauucaaccaucacaucacaagauguugcaaaugcgguaguuggguaugguguguggccucauuaccuaacaccacaagaugcuacugcaauagacaaaccuacucaaccagacacuuccuccaacagauuuuauacauuggaaaguaaaguuuggacacaaacuucaaaaggauggugguggaaauuaccggaugcucuaaaagauaugggaaucuuuggggaaaacauguucuaccauuucuuaggcaggucaggguacacaguacauguacaauguaaugcaaguaaauuucaccaagguaccuuauugguugcuaugguuccagaacaccaacuagcaagugcaaauaaagguaaugucacagcaggauacaacuacacccauccuggugaggcuggcagggaugugggacaaacaagagugaauaaugacagacaacccagugaugauaauugguuaaauuuugaugguacuuuuauggggaaucuguugauuuucccacaucaauuuauaaacuuaaggaguaauaauucagcaacuauaauaguaccauauguuaaugcagugccaauggauuccaugcuuagacauaacaauuggaguuuguuaauaauaccuguuagcccauuaaagagugacacacuagcaacaucccagguaccuaucacuauaucuaucaguccuaugugugcugaguucucaggugccagagcaaagccaaaugcagccccucagggauuaccaguuuauguaacgccaggaucuggucaauucaugacaacagaugauuugcaaucacccucugcacugccaugguaucacccaaccaaagaaauauucaucccaggagagguaaaaaauuugauugaaaugugucaaguaggcacacuuauaccuguaaauaauacugaugcaaacuugcgaaacaucaauaaauacacuguucaauuaaguagucaaacugauuuagcuaaagaaauauuugcaauuaagguggauguggccucacaaccgcucucuaguacacuucuuggagaaauauguaguuacuacacacauuggacugguagccuuagauuuagcuuuauguuuugugggaccgcuaacacaaccuuaaagguuuugcuugccuauaccccaccuggcaucaagaaaccagagagcaggaaacaggcuauguuaggcacacauauuguaugggaugugggccuacaaucaacuguaucucuaguaguacccuggguuagugccagucauuuuagauacacaacuccugacacauacucagcagcagguuauaucacaugcugguaucaaacaaauuuuguauuuccaccuaauacaccaaacacugcugauauguuaugcuuugucucugcguguaaagacuuuuguuugcgcauggcaagagauacggauaugcauguucagaauguaccaauaacacaaaacccaguugagagauauguagaugauguuuuaaaugaaguuuuaguuguuccaaauauuagggagagccauccauccacaucaaauucugccccugcauuagaugcugcugaaacuggccauacuagugcaauccaaccagaagacacuauagaaaccagauauguacagacaucacaaacuagggaugaaaugaguauagagaguuuucuagguagaucagguuguauacauauaucaacuauaacuguggauaaugauguagauuauaauucaaagcauuauaauaaauggcaaauaaccuuacaagaaauggcucaaguuaggcguaaauuugaauucuuuacuuaugucagauuugauucagagguuacuuugguaccuuguguagccggcaagggagaugauauuggacacauuguaaugcaauacauguaugugccuccuggugcaccacuuccaaacucaagagaugauuuuacauggcaaucuggcaccaaugcuucugucuuuuggcaacauggccaagcuuuccccagauucucucuaccuuucuuaaguauugcuucugcuuauuacauguuuuaugaugguuaugauggagacacuucaagcuccagauaugguacaucaguuacaaaccacauggggacacucuguucaagaauugugacaaauaaacaacuucauccuguugaagucacaacucguguauaucauaaggcaaagcauauucgagcaugguguccuagagcaccaagggcugugccuuauacacaugcucacgucaccaauuauaaaccacaagauggugauguacagaucuucuuaaaacccagacccagccuaacaacauuuggaccuagugacauguauguacauguuggaaaucucauuuacagaaaucuucaucuuuucaauucagauaugcaugacucuauauuaguuucuuauucaucugauuuagucauuuaccgcacaaacacuacaggugaugacuauaucccaacaugugacugcacccaagcuacuuacuacuguaaacacaagaauagauauuucccaauuaauguuaauagucaugauugguaugaaauccaggaaagugaguauuacccaaaacacauacaauacaaccugcuaauuggugaagggccuugugagccaggugauugugguggcaaauuauuauguaaacaugguguuauaggcaucauuacugcugguggagagggacauguagcauuuaucgaucuuagacacuuucacugugcugaggaacaaggcauaacugacuacauacacauguugggugaagcuuuuggaacagguuuuguugacaguguuaaggaucaaauaagugcuauaaacccaauaaacaauauaaguaaaaaaauaaucaaauggcuucuuagaauuauaucugcaaugguuauaauuauuagaaauucaucugacccacaaacaauaauagcuacucuaacuuuaaucggguguucagguucuccauggcgauuccucaaagaaaaauucuguaaauggacccaacuuaauuacguucacaaagagucugauucauggcuuaaaaaauucacagagaugugcaaugcagccagaggcuuagaauggauugguaacaaaauaucaaaguuuauugaguggaugaaaucuauguuaccucaagcucaacuuaaaaucaaauauuuaagugaacuuaaaaaauuaaauuuucuagaaaaacaaauggaacaucuuagaauugcugauucacaaacucaagagaaaauaaaacaugagguagacacucuucaugaucuuucauguaaauuucuuccacuuuaugcuagugaagcaaagagaauuaaaauuuuauacaauaaguguaacacaauuaucaagcagaggaaaagaugugaaccaguagcaguuguaauacauggugaaccuggaacuggcaaaucaaugaccacuaauuuccuggcuagaaugauuacaacugagagugacauuuacucucuaccaccugaucccaaauauuuugauggauaugaucaacaaaguguaguuaucauggaugaugugaugcaaaauccaaguggagaagauaugacucuauuuugucaaaugguaucaagugucacauuuauaccaccaauggcagauuuaccagauaaaggcaaaccauuugauucuagauuuguguuguguaguacuaaucauaaucuauuagcuccaccaacaauaaccucuuugccagcuaugaacagaagauuuuucuuugauuuagauaucauaguaugugauaaauauaaggacccacagggcaaacugaaugugucugcugcuuuccaaccgugugauguugacacaaagauuggcaaugcacguuguuguccauucauuugcgguaaggcagugauguuuagggaucgcaauacaugucaaacuuacacauuagcacaaguguacaaucaaauacuugaagaggacagaaggcguagacaggugauugaugugauggcugcaauuuuccaagggccuauuacccuugagggaccaccaccagcagcaauuagugaccugcuacagucagugagaaccccagaagugauuaaguauugugagaauaacaaauggauuauaccagcagaguguaaaauugaaagggaccuuaauauagcaaauacuauuauuacaaucauugcuaauauuauuaguauuucugggauaauuuauguaauauacaaguuauuuugcacacugcaaggaccauauucaggagaaccuaagccaaaaacuaagauuccagaaagaagagugguugcccaggguccagaagaagaauuuggaagaucacuuauuaagcauaauucauguauuguaacaacacagaaugguaaauuuacaggucuuggaauuuaugauagaguguuaauccuaccaacacaugcagauccuggucaugaaguacaaauagauggcauuacaacuaaaguagaggagucauuugaucuauuuaacaaggauggagucaaguuagaaauuacuguacucaaauuaaaaaggaaugaaaaguuuaaagacauuagaaaauacauaccagaaaaugaggacgauuacccagauugcaaucuagcccuuucugccaaucaaccagagaccacuauuauuaaugugggagaugugguauccuaugguaacauucuucuuagcggcacccaaacagcuagaaugcuuaaauauaauuauccaacaaagucugguuauuguggugguaucuuauauaaaauaggacaaguucuuggaauucauguaggaggaaauggaagagauggcuuugcugcuauguuguugagaucuuacuuuucagagacacaagggaaaauagucacuucaaaguccacuagugaaugugguuugccuaguauccauacaccaagcaagacuaaacuccaaccuaguguauucuuugauguauuuccaggcacuaaagaaccagcuguucucacaaauagugaccauagacuagagguggauuuuaaucaagcucuauuuucuaaauacaaaggaaauaaccaguguguuaugaaugaucaugucaaaguagccauuucucacuacucagcacaacucaugacucuggacaucaacccagaaccuauuucuuuagaagauagugucuuugguacagaaggucuggaagcucuugaccuuaacacuagugcaggauucccauaugugucaaugggcauuaagaagaaagauuuaaucaauaagcaaacaaaagauuugacuaaacuuaaaauagcauuagauaaguaugguguugauuuaccuaugguuaccuuucucaaagaugagcuuaggaagaaggaaaagauugcugcugggaaaacucgugugauugaagcuaguagugugaaugauacuauacuguuuaggacaacuuuugguaaccuuuucuccaaauuucauuugaauccagguauuguuacaggcucugcuguagguugugauccagagacauuuuggucaaaaauuccaguuauguuggauggugaaugcauaauggcuuuugauuauacuaauuaugauggaagcauacaccccaugugguuucaagcucuuaaagagguuuuguccaacuuauccuuugaagcuaguuuaauugacagauuguguaaauccaaacauauuuucaaaaauauguauuaugaaguggaggguggagucccaucagguuguucuggaacuagcauauuuaauacaaugauuaauaauauuauuauuaggacacuaguguuagaugccuauaaaaacauugauuuggauaaacucaagauaauugccuauggagaugauguacucuuuucauauaaauaccagcuugauauggaagcuauugcuaaugaagguaccaaauauggauuaacaauaacaccugcugacaaaucuaguacuuuuaaacaacuugauuauaguaauguuacuuuucuuaaaaggggauuuaaacaagaugagaaguaccaauucuuaauacacccaacauucccaguugaagagauucaggaguccauucgcuggacaaagaaaccaucucaaaugcaggagcaugucuugucauugugccacuuaauguggcauaaugguagaagugccuauaagcaauuugaggagcgaauucgcaguguuagugcuggucgcgcacuguauauuccuccuuaugacuugcucuugcaugagugguaugaaaaauuuuaaauuguuuagauauagaaguauuaaacaauuaguuuuuuaguuuuau

SEQ ID NO: 41 - RNA, 7134 nt, Human rhinovirus
uuaaaacuggauccagguuguucccaccuggaucuccuacgggaguuguacucuguuauuucgguaaccuuguacgccaguuuuaucuccccucccccaauuguaacuuagaagcaauacacaaggaccaauaggcagugauuaaccagaucacuuaaggucaagcacuucuguuuccccggucugaguugauaugcucuaacagggcaaaaacaagucagaucguuauccgcaaagugccuacgcaaagccuaguaucaucuuugaaaauguaugguuggucauuccgcugaaccccacaguagaccuggcagaugaggcuagaaaccccccacuggcgacaguguucuagccugcguggcugccugcacacccuuaugggugugaagccauauauuugacaaggugugaagagccccgugugcucacuuugaguccuccggccccugaauguggcuaacccuaacccugcagcuagugcauacaagccaguauguugcuagucguaacgagcaauugcgggaugggaccaacuacuuuggguguccguguuucacuuuuuaccuuuauacugcuuauggugacaauauauauauagcauauauauugacaccaugggcgcucagguauccagacagaauguuggaacucacucuacacaaaauucagugucaaauggauccagcuuaaauuauuuuaacaucaauuauuucaaggaugcugcgucaagcggugcaucaaaacuugaauucucacaagauccuagcaaguuuacugacccagucaaagaugugcuagaaaaaggcauuccaacacuacagucaccaacaguugaggcauguggguauucugauaggauuauucagaucacaaggggagauucuacaauuacuucacaggauguggcuaaugcugugguugguuaugguguauggccacacuauuuaacaccacaagacgccacugccauagacaaaccaucuagaccagauacuucuuccaauagauucuauacuuuagaaaguaaaauguggaguagcaccucaaaaggauggugguggaaauuaccagaugccuuaaagaacaugggcauuuuuggugaaaauauguuuuaucacuuucuuggcaggagugguuacacagugcauguucaguguaaugcaagcaaguuucaucaaggaacuuugguuguugcuaugauaccagaacaccaauuagcuagcgcaacauaugggaauguugcagcuggauacagauuaacacauccuggugaggcagguagagauguuagccuuucaagaucagaaaauacagaaaaacaaccuagcgaugauaacuggcuuaauuuugauggcacacuauuagguaacauaaccauuuucccacaccaauuuauuaauuugagaagcaauaauucagcaacuauuauaguuccuuauguaaaugcuguccccauggacucaaugcuuagacauaacaacuggagucuaguaauuauccccauaugucccuuggaagcuaaugguauacaaccuguuguugucccaauuacaauaucaauuagcccaaugugugcugaauuuucaggugcacgugcuaaaagccagggacuaccaguuauggucacaccaggaucuggucaguuuaugacaacagaugauuaccagucuccuagugcuuuaccuugguuccacccuacuaaagaaauaucaauaccaggacaagugaggaauuuaauugagaugugucaaguagacacgcuuauaccaguaaauaauuuagaacaaaauauuaggaaaguagauauguauucaguaauuuuaggccaagaaacaacaccagcuaaagaaauauuugcaaucaaaguggacauugcaucacaaccacuugcaacuacaaugauuggugaaauugcuaguuauuacacucacuggacagguaguuuacgcuuuaguuuucuauuuuguggcacagcuaauacuacacuuaaauuauuauuggccuacacacccccugguauugaaaaaccacagagcagaaaagaugcuauguugggaacacauguggugugggauguaggguuacaaucaacaauaucuaugguuguaccauggguuagugcuagccacuauagaaacaccacaccagacacuuacucacaagcaggauacauaacauguugguaucaaacuaauuuaauugugccuccaaauacaccaaccacugcaagaaugcugugcuuugugucaggauguaaagauuuuuguuuaagaauggcucgugauacaaauuuacauaugcaaagcaugccaauaacucaaaacccaguagaaaauuuuguagaugaaguuuuaaaugaaguuuuaguaguuccaaacaucaaacaaagucaggcaacaacaucaaauucagcaccugcguuggaugcagcugagacuggacacacuagcaauguacaaccugaggauaugauugaaacuagauauguucagacaucacaaacacgugaugagaugagucuugagagcuucuuaggaaggucagguuguauucauaucucagaacugauuguagauuaugacaacuacaacacaaagaacuuuacugaguggaaaauaaaucuacaggaaauggcacagauuaggagaaaauuugaauuguuuacauauguuagauuugacucugaagugacauuaguucccucaauagcagcccagggcgaggacgugggucauguuguaaugcaauauauguauguccccccuggugcaccaauucccaaaacaaggaaagauuaugcauggcaaucugguacuaaugccucaauauuuuggcaacauggucaaacauacccaagguucucuuuaccuuucuuaagcauagccucagcauacuacauguuuuaugauggguaugauggugaucaaacugaauccagauauggcacuguaguuaccaacgauauggguacuuuguguucuagaauuguuacugaccagcacacacaucaugugaaagugacaaccagaguguaccacaaagccaagcauguuaaagccugguguccuagaccaccaagagccauugaguauacacacacacauguuacuaauuauaaaguuaaagguaaacaagaagagacagcaaucaaauacagaagagacaucaaaguugucaagaauguagguccuagugacauguauguacauguagggaaccucauuuauagaaaucuacaccucuuuaauucagacaugcaugauaguauucuagucucauauucaucagauuuagucauauaccgaacaaauacuacaggugaugacuauauaccaacaugugauugcacugaagcaacauauuacuguagacacaaaaauagauauuacccaauuaaaguuacuagccaugauugguaugaaauccaagagagugaguauuacccuaaacacauacaauacaauuuacuaauaggagaaggaccaugugaaccuggugauuguggagguaaauuacucuguaaacauggagugauaggcaugaucacagcaggaggagaaggccauguugcauucauugaucuuagacacuuucacugugcugaagaacagggcauaacugacuauauucauauguuaggugaagcauuugggaauggguuuguagauaguguuaaggagcaaauaaaugcaauuaacccaaucaauaguauuaguaagaagauuaucaaaugguuacucagaauaauaucagcaaugguuauaauuauaagaaauuccucugacccucaaacgauaauagcaacacuaacucuaauugguuguucaggaucaccauggagguucuuaaaggaaaaauuuugcaaguggacacaauuaaauuauauacauaaagaaucagauucauggcuuaagaaauuuacugaaauguguaaugcagcuaaaggcuuagaguggauugguaauaaaaucucuaaauuuauagauuggaugaaaucaaugcuaccacaggcacagcuuaaaauuaaauauuuaagugaguugaagaaacuaaaccuccuugaaaaacaaauagaacaucuuagaguugcagauucugcuacacaggaaaagauaaagugugaaauagacacauuacaugaucucucuugcaaauuucuuccucuauaugcuagugaagcaaaaagaaucaaaguccuuuacaacaaguguaauguugucaucaagcaaaagaaaagaugugaaccuguggcuguuguuauacauggugagcccgggacaggaaagucaaugacaacaaauuucuuggcaagaaugauaacuaaugacagugauauuuauucacuuccaccagaccccaaguauuuugauggauaugaccagcaaaguguaguuauaauggaugauaucaugcagaauccaaguggagaagacaugacuuuguuuugucagaugguaucgagugucaccuuuauaccuccaauggcugauuugccggauaaaggaaaaccuuuugauucuagauuuguauuguguaguaccaaccauaguauguuagcuccacccacaaucacaucauugccugcaaugaauagaagguuuuucauggauuuagacauuauaguuaaugauaaguauaaagaugcccagggcaaacucaauguaucugcagccuucaaaccaugugauguugacacaaagauuggcaaugcacgcugcugcccauuuauaugugguaaagcagucacauuuaaggauagaaauacuugucrcacuuucucuuuagcgcaggucuauaaccaaauucuugaugaagacaaaagacguaggcaagucauagacguuaugucugcaaucuuucaaggaccgaucucuuuagaagguccuccuccagcugcaauuagugauuuacuucaaucagucagaacuccugagguuauuaaauauugugaacaaaacaaauggauaauuccagcugaguguaaaauagaaagagaucuaaauguggcaaauacaaucauaacaauaauagcaaauaucauaaguauuucugggauaauuuauguuauuuacaaacuauucugcacacuacaaggacccuacucaggugaacccaaacccaaaacaagaaugccggagagaaggguaguggcucagggaccagaagaggaauuugguaggucacuuaucaagcauaauuccuguguugucacuacacaaaaugguaaguuuacugguuuaggaauuuaugauagaguauuaaucauuccaacacaugcagacccaggaaaagaagugcaaauugauggcaucacuacaggaguggaagauucauaugauuuguucaacaaggauggugucaaguuagaaaucacuguguuaaaauuaaagaggaaugaaaaauuuaaagauauuaggaaauacauaccagaaagagaggaugauuacccagauuguaauuuagccuuaucagccaaucaaccagaaacuaccauaauuaauguaggagauguaguaucauaugguaauauuuuacuuaguggaaaccaaacagcuagaaugcuuaaguacaacuacccaacaaaaucaggguauuguggugggauucuauacaaaauuggccaaguacuaggaauacauguugguggaaauggaagagacggguuugcugcuauguugcugagauccuacuuuucugaagcacaaggucagauaaucagcuccaaaucuacggauaaauguggucugcccaguauccauacaccaaguaaaaccaaauuacagccuaguguuuucuaugauguguuuccagguaguaaagaaccagcuguacuuucaagcaaugacccuagauuagaaguugauuuugaaaaagcucucuucucuaaauauaaaggaaaugaacauuguguuaugaaugaucacaucaauguagcugucucucauuacucagcucaauuggcuacccuggauauuaauccacaacccauuucuauagaggaaaguguuuuugguauagaaggacuggaagcacuugaucucaacaccagugcagguuuuccuuauguugcuauggggaucaaaaagagagacuuaaucaauaaacaaacuagggauauaacuaagcuaaagauggcauuagauaaauaugguguugauuuaccuaugguuacuuuccucaaagaugaacuuaggaaaaaagaaaaaauaucugcuggaaaaacucgugucauugaagcuaguagugugaaugacacuguccuguuuagaacaaccuuugguaaucucuucucaaaguuucacuugaacccagguauugucacagguucugcuguaggaugugauccagaaguauuuuggucaaaaauaccaguaauguuagauggagauuguauaauggcauuugauuacacaaauuaugaugguaguauacauccaaucugguuucaagcacuaaaggaaguucuagugaauuugucuuuugaagcuaaccuuauagauagauuauguaaaucaaaacacaucuuuaagaauguuuauuaugagguugaggggggcguuccaucaggauguucugggacuagcauuuuuaauacuaugauuaauaauauaauaauuagaacauuaguuuuagaugcuuauaagaauauagaccuggauaaacucaaaauaauagcauauggugaugaugugauauucucauacaaauaucagcuagacauggaagcaauugcgcaggaagguguuaaguauggacugacaauaacuccugcugacaaauccacacacuuuaaacaacuugauuauaacaauguaacauucuuaaaaagaggauucagacaagaugaaaaacaucaauucuugauacauccuacauuuccaauugaagaaaucuaugaguccauccgauggacaaaaaauccaucucagaugcaggaacauguuuugucauugugucauuuaauguggcauaaugguaaagauguguauaagaaauuugagaagcagauacgcaguguuggcgcuggucgcgcauuguauaucccuccuuaugaccuacuccugcaugagugguaugaaaaauuuuaaauuguuuagauauagaaauauuaaacaguuaguuuuuuaguuuuau

SEQ ID NO: 42 - RNA, 7140 nt, Human rhinovirus
uuaaaacugggaguagguuguucccaccuacucuacccacgugguguuguacacuguuaucacgguaacuuuguaugccaguuuugccacccuuccccguagcguaacuuagaaguuuguacacuuagaccaauaggcgauaaucauccagauuaucaaaggucaagcacuucuguuuccccggucaaugaggauaugcuuuucccaaggcaaaaaccuuagagaucguuauccccacauugccuacacagagccuaguaucaccuuugauguauuuagacuggucgcucccugcaaacccagcaguagaccuggcagaugaggcuggacguuccccacuggcgacagugguccagccugcguggcugccugcccacccauuugggugggaagccuaacuauugacauggugugaagagccgcgugugcucaaugugccuccuccggccccugaauguggcuaaccuuaaccccgcagccgcugcccaugauccaguggguauacggucguaacgcgcaagugugggaugggaccaacuacuuuggguguccguguuuccuguuuuucuuuuuuuuaugcauuuuauggugacaauuuaugguauauagauugucaucaugggugcacaagugucaagacagaauguuggaacacacucuacacaaaauucaguaaguaauggaucaagucugaauuauuuuaauauuaacuacuuuaaggaugcagcuucaagugsugcuucuagauuggauuuuucccaggacccuaguaaauucacugauccuguuaaagauguacuugaaaaagguauuccaacacuucaaucaccaacaguugaagcaugugguuauucagauaggcuaauacagauaacucguggagauucuacuauaacaucacaagacauugcaaaugcgguuguugguuaugggguguggccaucauaucugacuccagaugaugcaaccgcaauugacaaacccacacaaccugacacuuccuccaauagauucuacaccuuggaaagucggaauuggacaaacucuucgacuggauggugguggaaauugccugaugcccuuaaagguauggguauauuuggagaaaacauguuuuaucacuuuuugggaagaucaggguacacuauucaugugcaauguaacucuaguaaguuccaccaaggcuuauugauaguugcugccauaccagaacaccaguuggcaucugcaacgaguggaaauguguggguaggauacaaccacacucacccuggugagcaagguagggaaguaguuccaacucgaagcuccacugacaacaaaagacccagugaugauaguugguuaaauuuugauggaacauuacuugguaauuuaccuauuuauccucaccaguacauuaaucuaaggacuaauaauucagccacucuuauuuuacccuauguuaaugcuguaccaauggacucuaugcuuaggcauaacaacuggagucuagugauuauaccaauauguccccuccaaguugaagguggaggcacaccaucuauacccauaacaguaucaauuaguccaauguucucagaauuuucaggaccaagaaauaaaguuguuuuuagucaggguuuaccaguuauguugacuccuggaucaggacaauucuuaacaacugaugauacacaaucgccaucagcauuuccuuauuuccauccaaccaaggaaauauucauaccugggcaagucaagaauuugauugaaaugugucagguugauacacucaucccuauuaauaauguaggagaaaauguuaaaucuguaaauauguacacuguugauuuaagaucucaaacugaacuugcacaagaagucuuugcuauaccaguugacauugcuucgcaacccuuagcuaccacauauauaggcgagauugcuaguuauuacacucauuggacugguaguuugcgcuuuagcuucauguucugugguucugcuagugccacuuuaaaacuacuaauugcuuacacuccuccugguguugccaaacccaaguccaggaaagaagccaugcuuggcacucauuuggugugggauguuggucuacagucuacugcuucacuaguuguaccauggguuagugcuagucacuuuagguucacaacaccugauacauauucuuccgcagguuacauuacauguugguaccaaaccaauuuuguuguaccugccaauacaccagccaaugcaaagauggcguguauggugucagcuuguaaagauuuuugccugagguuagccagagauaccaaucuacacaugcaagauggagugcucacacaaaauccaguagaaaauuacauagauaauguguuaaaugaaguacuuguaguuccaaauauccaaccuaguacaucuguaucaagucauucugugccugccuuggaugcugcagaaacgggacacacaaguucuguucagccugaggauaugauugaaacuagauauguuaucacagaucaaacaagagaugaaacuagcauugaaagcuuuuuagguagaucugguugcauugcuaucauaaaauuuaacacaaauaagacuaauuaugaugacauagguguaggauacaaaacauggaaaauuagccuucaagagauggcacaaauuagaaggaaauuugaguuguuuacauauacaagauuugacucagagauuacaauagucacugcagcagcugcucaaggagaagauaauggacauauuguguuacaauuuauguauguacccccaggagcaccuguacccaagaaucgugaugacuuuacauggcaaucaggcacaaaugcaucuguuuucuggcaggaaggacaaccauacccuagauuuacaaucccuuuuaugagcauugcaucagcuuacuauauguuuuaugauggcuaugauggugaugaugcuaaaucaauauaugguucugugguaacaaaugacaugggaacuauauguguuagaauagucacauccaaacaaagacacaauuuaaacauugucugucgcauuuaccacaaagccaagcauauaaaagcaugguguccacgcccaccaagggcuguuccuuaucaauucacacauucuacuaauuacauaccagauaguggugagguaacaacacaaaucaaacccagaaccaauguuuuuacuauuacaucugcuggaccauccucuauguucgugcauguggguaauuugauuuacagaaaccuucaucucuucaacucugaucuagaugauucuauucuugucucauacucuagugauuuaaucauacaccgaacaaacacugaaggugaugauauaauuccuaauugugauugcacugaaugcacauauuacugucaucauagagauagauauuucccuaucaaaguuacugcacaugauugguaugaaauucaagaaucagaauacuacccaaaacauauucaauacaaccuguugauuggagaaggaccuugugagccuggagauuguggagguaaauuacuguguaaacauggagucaucgguauagugacagcuggaggugauggccauguugccuuuauugaucuuagaaaguuucaaugugcugaagaacagggacucucagauuauguggagcauuugggacaaguuuuugguguagguuuuguagauagcauuaaagaacaggugaauuucaucaacccuacuaguaaaauuggaucaaagguaguuaaauggcuacuaaggauaguuucagcuaugauaauaaugguuaggaauaguucagauccucaaacuauaauugccacccucaccuuguugggcugcucagggucgccauggaaauuccuuaaggagaaauuuugugcauggcuccaacuuaacuaugugcauaaacaaucugauucauggcuuaagaaauucacugaagcaugcaacgcugcacgcggguuggaauggauuggacaaaagauauccaaauuuauagauuggauuaaggguauguuaccacaagcccaguuaaaaguugauuauuuaaccaaauugaagcagcucaauuuguuagaaaagcagauagaaacaaucagacuagccccagcuaaugaucaggagaaaaucuuuacagagauaagcacccuccaugauuuaucuuugaaauuuuuaccauuauaugcgucugaagcacgcaggauuaaaaauuuguauauuaaaugcaacaacaucaucaagggagggaagcgaaaugaaccaguugcaguacuuauacaugguucuccugguacugggaaaucucuugcuacuucuguucuugcucgaauguuaacuguugaaacugacauauacucauuacccccagaucccaaauauuuugauggauaugaucagcagaguguugucaucauggacgacaucaugcaaaauccuaauggugaagauaugacgcuauuuugucaaauggugucuagugucccuuucauaccuccuauggcagaucuuccagacaaaggaaaaccauuuacaucuaaauuugugcuugcaaguacuaaccauacucuccucacaccaccaacaguaucuucacuaccagcaaugucaagaagauuuuauuuugaucuagauauucaagucaagaaagauuaucuuuuagaugggaaacuagauauagcaaaaagcuuccggcucugugacaucaacaccaaaauagguaaugccaggugcugcccauuuaucugugguaaagcuguagaauucaaggauagaaacacauguaaugucuugucuuuaucucaacucuauaaccauaucagagaagaagauagaaggaggaguagugcagcacaagcaauggaggcuauuuuccaagguauagauuugcaaucuccaccaccuccagcuauaacugaucuacugagaucuguuagaacuccagaaauuaucaaauacugucaggguaauaauuggauuguuccagcugaaugcucuauugagagagacuuagggauagcaaacauggcuauaaguauaauagccaauguaguaucuauaguagguguuauuuauauaauauacaaacuguuuugcacacuucaggguccauacucaggagaaccaaagcccaaaaguagagcuccagaaagaagaguggucacccaagguccagaggaagaguuuggucguucacugcuuaaacauaacugcuguauuguaacaacugauaaaggcaaauuuacaggucuugguauauaugaucaagucauggugcuuccaacacauucugacccaggcucugaaaucuugguggauggagugaaaguuaaaaucucugauucuuaugaccuacauaaucaugaggguaucaaguuggaaauuacaguuguaaaguuaguuagaaaugagaaauucaaggauauuagaaaauauuuacccucgcgugaagaugauuacccugcuugcaaucuugccuuacuagcuaaucaagaugaaccuacaauaauaaauguuggagaugcagaaucuuauggcaacauauuauuaagcggcaccaacaccgcacgaaugaucaaguaccauuauccaacgaaagcuggauauugugggggugucuuguacaaaguuggcuccauucucgguauccauguuggugguaaugguagagauggguuuucugcgaugcuccucaaauccuacuuuggugaaacucaagguuugaucacuaaagaacuaccuguaucuguuaagaauuugccauccauacauguuucauccaagacucgcuuacaacccaguguuuuccaugacguuuuuccuggaacaaaagaaccugcaguucuaaguaauaaugauccaagauuagaaacugacuuugacacagcacucuucucaaaauauaaaggcaauccuacuugugaagugaccccacacaugaaaauugcuguagcacacuaugcagcacaauuaucuacacuagauauaagcacccaaccccuuucacuagaagagaguguguuugguauugauggauuagaggcucuagaucuaaacacuagugcaggauuuccuuauguuucauuaggaauaaaaaagaaagaccuuauagauaagaaaacaaaagauaucacaaaacuuaagaaagcaauugacaaauaugguauugauuuacccauggucacuuuccuaaaagaugaacuuagaaagaaggaaaaaauaagagauggaaagacuagaguuauagaagcuaauaguguaaaugauacugugcuauuuagaaguguauauggaaaucucuuuucuacuuuucacaagaacccagguauaguuacugguucagcagugggaugugauccugaaguguucuggucaacuauaccucuuaugcuagauggagaaugcuuaauggcuuuugacuacucaaauuaugaugguaguuuacauccaguuugguuuaagugcuugagcaugcuuuuggaagauauaggguuuucuucucagcuuauuaaccaaauuuguaauuccaagcacauauauaagucuaaauauuaugagguagaaggagguaugccaucuggaugugccgguacuagcauuuuuaacacaauaaucaauaauauuauuauuagaacuuuaguacuagaugcuuauaagaacauagauuuagacaaauugaaaauuuuggcauauggcgaugaugucauuuuuucuuacaauuuuaaacuugauauggcaguccuugcuaaggaaggggagaaauaugggcuaacaaucaccccugcugauaagucugauguuuuucaggaguugacuuauaagaauguaacuuuucuuaaaagaggauuuagagcugaugaucgccauucuuuucuuauacauccuaccuuuccuguuguagaaauucaugacuccaucagguggaccaaaaacccuucauguaugcaagagcauguguuaucuuugugucacuuaauguggcauaaugguagacacgcauaucaggaauuugucaaagguauacgcaguguauuugcuggucgggcacuguauauaccggcuuaugaaguucuugagcaugaaugguaugaaaaauuuuagauauaaaacuguuaaauguaguuaguuuauuaguuuuau

SEQ ID NO: 43 - RNA, 7139 nt, Human rhinovirus
uuaaaacuggauccagguuguucccaccuggaucuccuaacgggaguaguacacuauuauuacgguaauuuuguacgccaguuuuaugauccccucccccuuuuguaacuuagaaguuaaacaaaaugaccaauaggcggcaaucucccagauugucaaaggucaagcacuucuguuuccccggucaaagcugauaugcuccaacagggcaaaaacagcugagaucguuacccgcaaagugccuacgcaaagcuuaguaacacuuuugaaguuacgugguuggucgcucagccaaaccccaugguagaccuggcagaugaggcuagaaguaccccacuggcgacaguguucuagccugcguggcugccugcacacccucugggugugaagccauauaauggacaaggugugaagagccccgugugcucacuuugaguccuccggccccugaauguggcuaaccuuaacccugcagcuagugcaugcaauccaguauguaucuagucguaaugagcaauugcgggaugggaccaacuacuuuggguguccguguuuccuuuuuauccuuauugauugcuuauggugacaauauauaguauuauauauugacrccaugggcgcccagguaucuagacagaauguugguacacacucaacucaaaaugugguuucuaguggaucuaguuuaaauuauuucaacaucaauuauuucaaagaugcagccucgagcggugcaucaaaauuggaauuuucacaagauccaaguaaauucacugauccagucaaagauguacuagagaaaggcauucccacucuucaauccccaacggucgaagcguguggauacucugacagaaucauucaaauuacuagaggagauucuacuauaauaucacaagauguggccaaugcuguuguuggcuauggaguauggccucacuaucucacagcacaggaugccaccgcaauagacaaaccaucacaaccugacacaucaucuaauagauuuuauacauuagagaguaaauuguggacaaaugaaucaaaagguuggugguggaaguugccugaugcucuuaaggauauggguguuuuuggacaaaacauguacuaccacuuccucggaagaagugguuauacaguccauguccaaugcaauucuagcaaauuucaccagggcacauugauaguagcaaugauaccagaacaucaauuagcagcagcagaaaagggaaauguaacugcugguuacaacuugacacauccaggugagaaagguagaacaauuggaauacccgaucguuugcauccaaguaaacaaccuagugaugacaauugguuaaauuucgauggcacauugcuaggaaauauaaccaucuuuccacaucaauucaucaacuugaggagcaacaauucagcuacaauaauuguuccuuaugugaaugcaguaccuauggauuccaugcucagccauaacaauuggaguuugguuauaauccccaucuguccuuuagaaguuaguacuacuggaacuaaugguauaccuauaacugugucuaucaguccuauguuugcugaauuuucuggugcacgugcuagaagccaagguuugccaacuaugcuaacaccugggucuggacaauuuaugacuacagaugauuuccaaucaccuugugcacuaccaugguuccaccccacaaaggagauuucaauaccuggugaaguuaagaauuugauugaauugugccaaguugauaguaugauuccaauaaauaauguugcagacaaaaucaggaguguggacauguauacaguagugcugcagagacaagaugaacuaaugcaagaggucuuugcuauaaggguugauguggcaucgcaaccgcuugcaacaacauuaauuggugaaaucucaaguuauuauacccaauggacuggaagucuccgcuucagcuucauguuuuguggaacagcuaauacaacacuuaaacuuuuaauagcauacacacccccaggcauagcaaaacccaaaaguaggaaagaagcaauguugggaacccauauuguaugggauguggguuuacaaucaacaauauccaugauuguaccuuggguuagugcuagccauuucagaaauaccacaccugauacauacucuucagcuggguucauaacaugcugguaucaaacuaaucuuguguuuccuccagauaccccaaccacugcuagaaugcuuugcuucguaucuggcuguaaagauuuuugucuacguauggcuagagauacaaaccugcacaaacaaucugguaucauuacacagaauccaguagaaagcuacauagauggggucuuaaacgaaguccuugugguuccaaacauuagggagagccaacccacuacuucuaauucugcuccagcauuggaugcugcugagacuggucacacuaguaauguacagccugaggacgugauugaaacacguuaugugcagauuacacaaacuagagaugagaugaguguugagagcuuccucggcagaucuggauguauucauauuuccaaauuagaaauugacuauaguaacuacaaugaggagaauaaaaauuucacaacuuggcaaauuaaccuaaaggaaauggcacaaauaagaagaaaguuugaauuauuuacauauguaagauuugauucagaauugacucuggucccaugcauagcagcaaaaaaugauggcauaggucauguugucaugcaauacauguauguccccccaggagcaccauuaccuacuaaaagagacgauuacacauggcaaucuggcacaaaugcuucuguauuuuggcagcauggacaaacauacccuagauuuucacuuccauuucuaaguauugcaucugccuacuacauguuuuaugaugguuaugauggucacucaacugaaucacauuaugggacgguugugaccaaugacaugggaacguugugcuccagaauaguuacugaacaccaugguacacagguucacgucgcaacaagaauauaucauaaagcaaagcauguuaaggcuugguguccaagaccuccaagggcaguugaauauagacacacacauguaaacaacuauagaccagaugauggagaagcagccauaacaauccccauuagaacugauauacgagcaaucagaacaguugguccuagugauauguaugugcauguagggaacuuaauauauagaaauuuacauuuguuuaacucagaaauuagugauucuguuuuaguuucuuacucaucggauuuagucauuuaccgaacaaacaccacaggugaugacuacauuccaacuugugacuguacagaugcaacauauuacugcaagcacaaaaacagguauuauccaaucaaaguuaccagccaugauugguaugaaauucaggaaagugaguauuacccaaaacauauacaauacaacuuauuaauuggugaagggccuugugaaccuggugauugugguggaaaauuacuauguaagcauggugugauugguaucaucacagcugguggagaagggcauguggcguuuauagaucuacgccacuuccauugugcagaggagcaaggaaucacugauuacauacauaugcuuggagaagcauuugguaauggauuuguagauaguguaagagaucaaguuaacgccauaaauccaauuaauaauaucaguaaaaaauuaauuaaauggaugcuuaggauaauuucagcaauggugauaauaauuagaaauucuucggacccucaaacaauuguagccacacuaacauuaauagggugcucuggaucaccauggcguuuucuuaaggagaaauucugcaaauggacacaauuaacuuauauccauaaggaaucagacucauggcuuaaaaaauuuacagaaauguguaaugcagcuagaggucuugaguggauugguaauaaaauaucuaaauuuauugauuggaugaaauccaugcuaccacaagcacaauuaaaagucaaauaccuuagugaauugaagaaauuaaauuuacuagaaaagcaaauugagaauuugcguggugcugauacuaauacacaagaaaaaauuaaauuagaaauugacacacuacaugauuuguccuguaaauuucucccucuauaugcuagugaagcuaaaaggauuaaaguauuauucaacaagugcaacacaaucauaaagcagaagaagagaagugaaccaguugccaucaugauacauggcccaccaggaacaggcaaaucuauaacaaccaguuuccuugcaaggaugauaaccaaugagagugauauuuauucauuaccuccagacccaaaauacuuugaugguuaugaucagcagaguguuguuauaauggaugauauuaugcaaaauccagauggagaagauaugucacuauuuugucagaugguaucaaguguggcauuuauaccuccaauggcugaucuuccagauaaagguaaaccauuugacucuagauuuguuuuuuguaguacaaaucaauccuuacuagcuccaccaacuauuaccucucucucugcaaugaaucggagauucuaucuagacuuggacaucacaguucaugauaauuauaaggauaaucuggguaaacuggaugugccaaaggcauucaaaccaugugauguugacacaaaaauagguaaugcuaaauguuguccauuuaucugugguaaagcugugucauucaaagaucgcaauaccugccagguguacccacuuagucaaaucuauaauuuaauuauagaagaggauaagcgccguagaaauguuguugauguuaugucggcaauuuuccagggcccuauauccaugaaugcucccccaccaccagcaauagcagauuuguugcaaucaguuagaacuccagaagucauuaaauacugugaggagaauaaauggguuaucccagcagauugcaaaauagaacgugauuuaaacuuagcaaauaauauaacaacaaucauagcaaacauuauuaguauagcagguauuauauuuguaauuuauaaauuauucuguucacuucaaggucccuauucuggggaaccuaaaccuaaaacuaaaguuccagaaaggagaguaguagcacagggaccagaagaagaauuuggucggucacuuauuaaacauaacucaugugugguaaccaccucaaaugguaaauuuacaggacuaggaauuuaugauagaacacucauuauaccaacacaugcagacccagguaaagagguacaaauagaugguauuacaacuacaguacaagauucuuaugauuuauacaauaaggaugggguaaagcuagagaucacaguucuuaaacuuaagagaaaugagaaguucaaagacaucagaaaguauauuccagagaaugaagaugauuacccagauuguaauuuggcuuuaucugcuaaccagccagaaacuaccauaauuaguguuggagaugucgugucauauggcaacaucuuacuuagugggaaucagacagcaagaaugcuuaaauacaauuacccuacaaaaucaggauauugugguggaauucuauauaaaauuggacaagucuuggguauacauguuggugguaaugggagagauggauuugcagcuauguuacuaagaucuuacuucacagaagcacaaggccaaauaaccaccaccaaaacuacugcugaguguaacuuaccuaguauucacaccccaaguaaaaccaaauugcaaccuaguguauuuuauaaugucuuuccaggaaacaaagagccagcuguacuuucagaacaugacccuagauuaaagacuaacuuuaaagaagcuuuguucucuaaguauaaaggaaauaaccagugugagauuaaugaccauauuagaguggcaauuucccauuauucagcacaauuggcaacauuagauauugacccaaguccaauuucuuuagaagauaguguuuuugguauagaaggacuagaagcacuugaucucaacacuagugcuggauuucccuaugucuccauggguauuaagaaaagggaucugauuaauaagcaaacaaaagauaucacaaagcuuaagauggcaauggacaaauaugguguugauuuacccauggucacauuucuuaaagaugaacuuagaaaacaggaaaagauuucugcuggaaaaacacgugucauagaagcuaguaguguaaaugauacuguacuauuuagaacaacauuugggaaucucuuuucaaaauuucauuuaaacccugggauuguaacugguuccgcuguggguugugacccagaaauauuuuggucuaaaauaccagcuauguuaaauggugaauguuugauggcauuugauuacacaaauuaugaugguaguauucauccaaugugguuccaagcucuuaaagaaauuuuaucuaauuugggguuucaaccugaucuaauagacagauuaugcaagucaaaacacauuuuuaaaaacauauacuaugagguugaaggugguguaccaucaggcuguucugggaccaguauauucaacacaaugauaaauaaugucauaaucagaacauuaguuuuagaugcauauaaaaacauugauuuggauaaacuuaaaauaauagcauauggugaugauguuauuuucucauacauauaucaacuagacauggaggcaauugccaaggaagguucaaaauauggccucacaauaacuccugcugauaaaucuagugaauuuaaacaauuggauuauaguaauguaacuuuucuaaaaagaggauuuaaacaagaugacaaauaucauuuuuuaauacauccaacuuuuccaauugaagagauucaugaguccauacgauggacaaagaaaccaucucagacacaagaacauauccuuucacugugccauuuaauguggcacaaugguagggauguguacaagcaguuugaacacaagauacgcagugugagcgcuggucgcgcacuguacauucccccuuaugaauugcuucagcaugagugguaugagaaauuuuaaauuguuuagauauagaaauaauaaacaauuaguuuuuuaguuuuau

SEQ ID NO: 44 - RNA, 7139 nt, Human rhinovirus
uuaaaacugggucuggguugcucccacccagaccacccaugugguguuguacacuguuauuccgguaacuuuguacgccaguuuugaacuccccuaccccuuuuguaacuuagaagcuaaacacaucgaccaauagcaggcaaucacccagauugcuuauggucaaguacuucuguuuccccggucuccucugauaugcucuaccagggcaaaaacagaguagaucguuauccgcaagaugccuacgcaacgccuaguaacacuuugaaguguuuuugguuggucgcucaguuacaaccccaguaauagaccuggcagaugaggcuagauaucccccacuggcgacagugaucuagccugcguggcugccugcacacccuuuaugggugugaagccaaacauaugacaaggugcgaagagccacgugugcucaucuugaguccuccggccccugaaugcggcuaaccucaacccugcagccauugcucacaagccaguggguauguggucguaaugagaaauugcgggacgggaccgacuacuuuggguguccguguuucacuuuuuuaccuuauuuugcuuauggugacaauauauauacagauauauauugacaccaugggcgcucagguauccagacaaaacguugguacucauucuacucagaauucuguuucaaaugguucuaguuuaaacuauuuuaacauuaauuacuuuaaagaugcggcuucaaguggagcauccaaauuggaauuuucacaagaccccagcaaauuuacagauccagucaaggauguuuuagagaagggaauaccaacucuacaaucaccaacuguugaagcaugugguuauucagauagaaucauccaaauuacaagaggugacuccacaauuaccucacaagauguugcuaaugcuguaguuggguauggaguuuggccacauuacuuaacaccacaagaugccacugcuauagauaaaccuucuaagccugacacaucuucuaauagauuuuacacauuagaaagccagaccuggaccaaugaauccaagggcuggugguggaaauuaccagaugcuuugaaagacauggguauuuuuggagaaaacauguuuuaccauuuucuaggcagaaguggauacacgguucauguccagugcaacgccagcaaguuucaucagggaacucuucugguagcaaugauaccagagcaccagcuagcuaccgcuguaggcggcaguguaucugcaggauacaauuacacacacccuggugaaaaggguagggauguuggaaaauuaaaccgugaauccaauccaagacaaccuagugaugacaauugguuaaauuuugauggcacauuauuaggaaacuugacaauauuuccucaccaauucauuaaccuuagaaguaacaacucggcuacuauuauaguaccauauguuaaugcugucccaauggauucaaugcuaaggcacaauaauuggaguuuagucaucauacccauuugugagcuuagagguagcgguguugaucucaccaucccuauuacaauuuccauuaguccuaugugugcugaauucucuggagcaagagcaaacagccagggguugccggucuuacuaacacccgguucuggccaauucaugacaacagaugauuuucaaucucccagugcucuacccugguaccauccuaccaaggaaauuucaauaccuggacagguuagaaaucuaguggaauuaugccaaguagauaccuugauaccaauuaacaacacagaagccaacaucagaaauaaaaauauguacaccguacaacuugguggugaaccugacccuacaaccccgguuuucacaauuaggguugauauugcaucacaaccauuagccacuacacuuauaggugaaguuuccagcuacuacacacauuggacugggaguguuagauuuaguuuuauguucuguggaucagcacuuacaacacuaaaguuauugauugcauauaccccaccugguauuagaguuccaagaaauagaaaagaagcaaugcuugguacacaucuaauaugggacguuggucuacaguccacagugucaauggugguucccugggucagugcuagucauuauagaaacacaaccccagauacauauucaauagcuggcuucauuacaugcugguaucaaacaaaacugguaguucccccaaacacagccuccacagcugauaugcugugcuuuguuucagggugcaaagauuucugccuacgcauggcaagagauacuaacuuacacaagcaaaguggaccuauugagcaaaacccuguggaaagauauguagaugaaguuuuaaaugaagugcuuguagucccaaacauuaaucagagcaacccuacaacauccaacucagcaccagucuuagacgcugcugaaacaggucauaccagcaauguucaaccggaggacaugauugaaacacgauauguucaaaccucacagacaagagaugaaaugaguguagaaaguuucuuggguagaucagggugcauacauaugucaacauuaaauauaaacuaugauaacuaugaugauucuauugaaaacuucaagguguggaaaauaaaccugcaagagauggcacaaauacguagaaaauuugaguuguucacauaugcuagauuugauucagagauuacaauuguaccuuguguugcugggcaagguggugacauuggacacguggucaugcaauacauguauguuccaccuggugcaccuacaccugagaaaagaaaugauuucacauggcaaucaggcacaaaugcaucuguuuucuggcaacauggucaagcuuaucccagauuuucauuaccauuccuaaguauugcaucugcauauuauauguuuuaugaugguuaugauggagauucugaaauaacgcgcuauggaacaucagugacaaaugauaugggugcauugugcuuuagaauaguaacugaacagcauacaaaucaaguuaaaaucacaacuaggauuuaccauaaagcuaaacauguuaaagucugguguccuagaccccccagagcaguggaauauacuaaugugcauuugaccaauuacaagcccaaagauagugaaaaacaaguuaccacuuucaucaaaccuagagcuaacuuaagagagauuagaacauuugggcccagugacauguaugugcaugucggaaauuuaauauauagaaaucugcacuuauuuaauucagaggcacaugauucuguauuaguauccuacucaucagauuuagucauuuaccgcacaaacaccguaggugaugacuuuauaccaacaugugauugcacacaagcuacauauuauuguaagcacaaaaacagguacuucccaaucacagucacuagucaugauugguacgaaauccaagagagugaauauuauccaaaacauauucaauauaaucuauuaauuggugaggguccuugugaaccaggugauuguggagggaaguuacuguguaaacauggagucauuggcauuauaacugcugguggugaagggcauguugccuucauagauuuaagacauuuccugugugcugaagagcaaggaguaacagauuauauccacauguuaggugaggcuuuuggaaauggcuuuguagauaguguuaaagaacaugugaaugcuauaaauccuguaaauaauauuaguaaaaaaguaauuaagugguuguugagaauuguaucugcuaugguuauaauaaucagaaacucaucugauccccaaaccguuguugccacuuuaacauuaauuggauguucugggucaccauggagauucuuaaaagaaaaauucuguaaauggacccaacuaacuuacauucauaaagaaucugauucuuggcucaaaaaauucaccgaaaugugcaaugcagcaagaggacuugaauggauagggaauaaaauaucaaaauuuauagaauggaugaaaucaauguugccacaagcacagcuuaaaguuaaauauuuaaaugaguugaaaaaauuaaaccuucuugaaaagcagauugagaaccugagaagugcugauucuaaaacucaagaaaggauuaagguugagauagacacauuacaugauuuguccuguaaauuucuuccacuuuaugcuagugaagccaagaggaucaaggugauacacaauaaauguaauacuaucauaaaacaaaagaaaaggagugaaccgguugcagugaugauacaugguucaccagguacuggaaaauccauaacaacaaauuuucuggcaagaaugauaacaaaugagagugacauauauucauuaccaccugauccuaaauauuuugauggguacgaucagcagucuguugucauaauggaugauaucaugcaaaauccagauggugaagacauggcacuauuuugucagauggucucuaguguaacuuuuauacccccaauggcugauuuaccugauaaaggaaaacccuuugacuccagauuuguucuuugcaguacuaaccacuccauguuggccccuccaacaauuacaucccuucaggcaaugaauagacgcuucuuucuugauuuagauauugugguacaugauaauuacaaagauucacaagggaaacuaaaugugucuaaagcuuuuaaaccaugugauguuggaacaaaaauagguaacgcacguuguuguccauucauuuguggcaaggcaguuacauucaaagaucgcaacacgugcuugagcuacccauugagucaaauuuacaaccuaauucuccaagaggacaagaggcguacucauguuguagauguuaugucugcuauauuucagggaccaaucucuauggaaguaccuccuccuccugcaauaacugauuugcuccgaucuguuaagacaccugaaguuauuaaauauugugaagacaauaaauggaccauuccagcugauuguaagauugagagggacuuaauucuugcuaacaacauuauuacaauuauagcaaacauaauuagcauagcagguauuaucuacauuauauauaaacuauuuugcucauuucaaggaccauacucuggugaacccaaaccuaaaacaaaaauuccugagaggagaguugugacacaggguccugaggaagaguuuggucgcucccugaucaaacauaacacuuguguggugaccacugauaauggaaaauuuacuggauugggcauuuaugacaaacucaugauuuuacccacccaugcugacccuggaaaagaaauuuacaucaaugggauugcaacaagggucagugauucauaugauauguacaauaaacaaggaauuaaacuagagauuacagcuguacuauuggauaggaaugaaaaauuuagagacauuaggagauauauaccagagagggaagaugauuacccugaguguaaccuagcacugguagcaaaucagccugaaccaacuaucauaagugugggugaugucauuucuuacggcaauauauugcuuaguggcaaccaaacagcacgcaugcuuaaauacaacuaucccacaaaaucuggguacugugguggagucuuguacaaaauagggcaaauuauagggauacauguggguggaaaugguagagauggauuuucagcaauguuacuuagguccuauuuuagugaaacucagggugaaaucauuacaucaaagaaaguucaugaauguggguauccaacuauacacaccccugcaaaaacaaaguuacagccuaguguuuucuuugauguguuugaagguucaaaagaaccagcagugcucacagaaaaggauccccguuuaacaacugauuuuaaucaagccuuauuuuccaaauacaaaggaaauguugaaugcaacaugucugaacacaugaagguugccauaucacauuauucugcucaauuaaugacuuuagauauagacccuagcaauauaacccuagaggagaguguguuuggcacugaagguuuggaagcucucgaucuaaauacuagugcagguuucccauacauuagcauggguauccgaaagagagauuuaauaaacaauaguacaaaagauaucaccaaguuaaaaguggcccuugacaaguauggaguugauuuaccuaugguaacauuccuuaaagaugaacucagaaagaaaggaaaaaucauggcuggcaaaacaagagucauugaagcaagcaguaucaacgauacaguugcuuucagaaugacauaugguaaacucuucucuaguuuccauaaaaacccagggaucaucacagguucagcgguaggaugugaucccgaaacauuuuggucaaaaaucccaguuaugcucgauggggagugcauaauggcauuugauuacacuaauuaugaugguaguauacaucccaucugguuugaagcacucaaacaaguucucauaaauuuauccuuugagcauagguuaauagacagguuauguaaaucaaaacacauauucaaggacacuuacuaugaaguugaaggggggguaccgucaggauguucuggcacuaguauuuuuaauacaaugauuaacaauguaauaauaagaacucuaguccuugaugcauacaaauauauagauuuagauaagcuuaaaauaauagcauauggugaugaugucaucuucucuuacaaauacccucuggauauggaagcaauugcugcagaaggaaacaaguaugguuuaacaaucacaccagcugacaagucugauaccuucaagaagcuugauuacagcaguguuacauucuugaagagagguuucaaacaagaugacaaauauucuuuuuugauucauccuacuuuuccaauuucugaaauacaugaaucaauuagguggacuaagaagcccucacaaaugcaggaacacguacuauccuugugucacuuaauguggcauaauggccgggauguguauaaagaauucgaaaggaaaauacgcaguguuagcgcuggacgugcacuguauauuccuccuuacgaucuccuguugcaugagugguaugaaaaauuuuaauauauagaaauaauaaacaauuaguuucuuaguuuuau

SEQ ID NO: 45 - RNA, 7131 nt, Human rhinovirus
uuaaaacuggauccagguuguucccaccuggauyuccuacguggaguuguacucuauuauuccgguaaucuuguacgccaguuuuauauucccuaccccuuuuguaacuuagaaguuaagcacacagaccaauaggcggugaccacccaagucacuaacggucaagcacuuyuguuuccccgguuaagauugauacgcuccaacagggcgaaaacaauyuaaaucguuaaccgcaaagugacuacgcaaagcuuaguaauaccuugaagaauuuauggcuggucguuccgcuauaaccccuaguagaccuggcagaugaggcuagaaauaccccacugguaacaguguucuagccugcguggcugccugcacacccuuuuugggugugaagccauauauuugacaaggugugaagagccccgugugcucacuuugaguccuccggccccugaauguggcuaaccuuaacccugcagcuaguguauguaauccaacauauggcuagucguaaugagcaauugcgggaugggaccaacuacuuuggguguccguguuucacuuuuuccuuuuauuuugcuuauggugacaauauauauaauauauauauuggcaucaugggcgcacaaguaucuagacagaauguuggaacucauucuacucaaaacucaguuucaaaugggucaagucugaauuauuuuaauauaaauuauuuuaaggaugcugcauccaguggagccucaaaacuugaauuuucacaagauccuaguaaguucacugauccagucaaagaugucuuggagaaaggaauuccaacauuacaaucuccaacuguggaagcauguggcuauucagauagaauaauacagauuacaagaggugauucuacaauaacaucacaagauguggcuaaugcaguuauagguuauggaaucuggccacauuaucugagcgcugaagaugcuacugccauugacaaaccuacacaaccagacacuucaucuaauagguuuuacacuuuagagaguaaaauauggcauacuaauuccaaaggauggugguggaaguuaccagacgcacuuaaagauauggguauauuuggagaaaauauguacuaccacuaucuuggcaggaguggauauacgguacauguucagugcaaugcuaguaaauuccaucaagggacauuacuggugguuaugauaccagagcaccaguuggcaaaugcaaacucugcuaaagcgggagcuggguauaauuacacacauccuggugagcgagguagacaaguuggugacccacgugaaaacaucacugcagcacacccuagugaugauaauuggcuuaauuuugaugguacaaugcuagguaauguucuuauauuuccacaccaauuuauuaaucuuaggaguaauaacucugcaacaauaauagucccuuaugugaaugcugucccaauggauucaaugcucagacacaacaauuggaguuugguaauaauaccaguuaguaaguugcaagcugauaacacugguaguguuguagucccaaucacuauaucaauaaguccaauguucgcugaauuuuccggagcacgagcgagacccgcaagagcuacuacagaaggcuuaccaacauacauaacaccagguucaggucaguuuaugacaacugaugauuuucaaucaccuucugcuuuaccaugguaucauccaacuaaagaaauuuuaauuccaggagaaguuaaaaaucuaauagaaaugugccaaguugauacacuuaucccuauaaacaauacagauaacaauuuaaggaaagugaauuuauacacuguggaguuaacuaaccaaccaacaccagcucaaaagauuuuuucuauuaaaguagacauugccucacagcccuuagcaaacacuaugcuuggucaaauugcuaguuauuacacacacuggacugguaguuuacgcuuuaguuuuauguuuuguggcacagcaaacacaacccuuaaacugcuucuagcauauacaccaccagguauuggagaaccaagagauaggaaacaagcuaugcuugguacacacauagucugggauguuggacugcaaucaacaguauccuuaguugucccguggguuaguucuagucacuuuagauacacuucuagagaugaacauucagcggcuggauacauaacaugcugguaccagacaagucuuguuuuucccccuaacacccccggcacagcugauauguuguguuuugugucagcuuguaaagacuuuugcuuacgcauggcuagggacacagauaugcacacucagagugaugcuauugaacaaaauccaauugaaaauuauguagaucaaguacuuaaugaaguuuuaguuguaccaaauauuaaagaaagucacccuaguacgucaaacucugccccaauucuagaugcugcugaaaccggacacacuaguaauguacaaccagaagacacuauugaaacccguuauguucaaaccacacaaacuagagaugaaaugagcauugagagcuuucuugguaggucagggugcguacacacuucaacaauugaaacaacgcuuagucauaaagauagauucaaaacauggaauauuaacuuacaagagauggcucaaaucaggagaaaguuugaaauguuuacauauguaagauuugauucagaaauaacccugguuccaucuauugcaggacguggugcagauauaggucacauaguuaugcaauauauguauguaccaccuggggcuccacuaccaacagacagaaagcauuuugccuggcaaucaaguacuaaugcaucaauauuuuggcaacaugggcaacccuuuccuagauuuucauuaccuuuuuugaguguugcaucugcuuauuacauguuuuaugauggcuauaauggugaugacuauacagcaaaauacgguaccaccgugguuaaucguaugggggcacuguguaugaggauugucacaaacaaacaaguucaugauguugaggucacaacuaauauuuaccacaaggcuaagcauguaaaagcguggugcccuagaccaccuagagcuguuccauauaaauauguugauuucaauaauuaugcagccagugauaguguugacauuuuuauaaaaucaaggcaaaacuugcaaacagcugggccaagcgacauguauguccaugucgguaacuugauauacagaaaucuccaucuuuucaauucagaaaugcaugauacaaucuuagugucayacucuucagauuuagucauuuaccgaacaaauacaacaggugaugacuacaucccuacuugugauuguacugaugccacauauuacuguaaacauaagaauagguacuaucccauuaaaguuaccagucacgauugguaugaaauucaagagagugaguacuacccuaaacauauucaauauaaucuuuuaauuggugaagggccaugugaaccaggugauugcgggggaaaauuguuaugcaaacauggagugauugggauagugacugcagguggagaaggacauguagcuuuuauugaccuuagacaauuccacuguguagaugaacaaggagugacugacuauauccauaugcugggugaagcuuuuggcgcagguuuuguugacaguguuaaggagcaaauaaaugcuaucaacccaauuaauaguauuaguaagaaaauaauuaaauggcuucuuagaauaaucucugcaaugguuauaauuauuagaaauucuuccgauccacaaacaauuauagccacauuaacuuugauuggauguucagguucccccuggagauuucuuaaagagaaauucuguaaauggacccaauuaaauuacauacacaaagaaucugauucauggcuuaagaaauuuacugaaauguguaaugcagccagggguuuagaauggauuggaaacaaaauaucaaaauuuauugaguggaugaaaucuaugcuuccucaggcucaacuuaaggugaaauauuugagugagcuuaaaaaauuaagcuuucuugagaagcagauggaacaccuuagaguugcugacucucaaacccaggaaaaaauuaagcaugagauugauaccuuacaugaccuuucuuguaaauuucuuccacuuuaugcuagugaagcaaagagaauuaagauauuacauaauaaguguagcacaauaaucaaacagagaaaaagaugugaaccaguugcaguugucauacauggagaaccuggcacuggcaaauccaugaccacaaauuuccuugcuagaaugauaacaaaugauagugacauauauucuuugccaccugaucccaaauauuuugauggauaugaucagcaaaguguaguuauuauggaugauaucaugcagaauccaaguggugaggauaugacuuuauuuugucaaaugguaucuaguguuacauuuauaccuccaauggcugacuuaccugauaaagguaaaccuuuugauucaagauuuguauuauguaguaccaaucauaauauguuggcaccacccacaauuacuucauugccugcuaugaauagaagauucuuuuuugacuuagauauuguagugugugacaaguauaaagacucacagggaaagcuuaaugugucagcugcuuuucgaccaugcgacauugacacaaaaauugggaaugcccguuguugcccuuucauuugugguaaagcugucauuuucagggaucguaauacuugucaaaccuauacuuuagcacaggucuacaaucaaauacuugcugaagacaaaaggcguagacagguuauugauguaauggcagcaauuuuucagggcccuauuacuauugaaggaccaccgccugcagcaauaaaugacuuguuaaaaucagucagaaccccggaaguaaucagauacugugaagaaaacaaauggaugguaccggcugaguguaaaguugaaagagaucuuaacauagcaaacacaauuaucacaaucauagcuaauauuauuagcauaucuggaauaauuuauguaauauacaaacuuuuuuguacauuacaaggaccauacucaggugaaccuaggccaaagacuaaaauaccagaaaggaggguuguagcccaggguccagaagaagaauuugguagaucacuuauuaaacauaauucauguguaguaucaacacagaaugguaaauuuacagguuuagggauuuaugacagaacacuaauauuaccaacacaugcagacccugguaaugaaauacagauugauggaaucacaacuaaaguagaaggcuccuaugauuuauacaauaaagaagggguaaaguuagaaauuacagucuugaaacuuaaaagaaaugagaaguuuaaagauaucagaaaauauauaccagaaagugaagaugacuauccagauuguaaucuagcccugucugcuaaucaaccagagaccacuauaauuaauguaggagaugugguaucuuaugguaauauuuugcuuaguggaaaccaaacagcuagaaugcuuaaauauaauuauccaacaaaaucagguuauuguggugguauccuauacaaaauuggccaaguccuuggaauccauguuggaggaaaugggagagauggauucgcugccaugcuguuacgaucauacuuuucugaaacacagggucaaauaaucacuuccagaucuacaagugaaugcgguuuaccuaguauucacacaccaaauaaaacaaaauugcagccuagugucuuuuaugauguguuuccugguaguaaagaaccagcuguccuuacaaguaaugauccuagauuagaaguagacuucaaagaggcuuuguuuucuaaguauaaaggaaauaaccagugcacuauaaaugaccauauuaaaguggccauuucccauuacucagcacaacugaugacauuggauauugauucuaagccuauuuccuuggaggagaguguuuuugguauagaagguuuagaagcauuagaucuuaacacuagugcaggauuuccauacguauccaugggcauuaagaaaagggauuuaaucaacaaacaaacuagagaucugacaaaacuaaaaguggcacuagauaaguaugguguugauuuaccuaugguaacuuuccuuaaggaugaacuuagaaagaaggaaaagauuugugcuggaaagacccgugugauugaagcuaguaguguaaaugauacuauauuguuuaggacaacuuuugguaaccucuucucaaaauuucacuuaaacccagguauuauuacugguucugcugugggaugugauccagaaacauuuuggucaaaaauaccagugauguuagacggagagugcauaauggcuuuugacuauacgaauuaugauggaaguauacaucccauuugguuccaagcuuuaaaggaaguauuaaucaacuuaucauuugagccaaccuuaauagauagguuauguagauccaaacauauuuuuaaaaauacauauuaugagguugaaggugggguuccaucgggcuguuccgguacuaguauauuuaauacuaugauuaauaauauaauuauaagaaccuuaguauuagaugcuuacaagaacauugaucuggauaagcuaaagauuuuggcuuauggagaugauguaauuuuuuccuacaaauaucaacuugacauggaagcaauugcuaaagaaggcaucaaauauggauugacaauaacaccugcugacaaaucuaaugacuucaagcaacuggauuauaauaauguaacauuucuaaaaagaggauuuagacaagaugagaaacaucaauuccugauacauccaacauuuccaguugaggaaauucaagaguccauucgauggacaaagaaaccaucucaaaugcaggaacauguacuaucacugugucauuuaauguggcauaauggcagagauguguacaaaaaauuugaggagcgcauacguaguguuagcgcuggucgugcacuauauauuccuccuuaugauuuacuacugcaugagugguaugaaaaauuuuaaauuguuuagauauagaaauauuaaacauuuaguuuuuuaguuuuau

SEQ ID NO: 46 - RNA, 7141 nt, Human rhinovirus
uuaaaacuggguccagguuguucccaccuggaccuccuaaguggagugguacacuauuauuccgguaauuuuguacgccaguuuuaucuccccaccccccuuuuguaauuuagaaguuaugaacacagaccaauagguggcaacuagccaaguuguuaaaggucaagcacuucugucuccccggcugacguugauaugcuccaacagggcaaaaacaaugaaagucguuauccgcaaagugccuacgcaaagccuaguaacacuuugaaaugucuaugguuggucgcucagcuauuccccauaguagaccuggcagaugaggcuagaaauaccccacugguaacaguguucuagccugcguggcugccugcgcacccuccccgggugcgaagccauauauaugacaaggugcgaagagccccgugugcucacuuugaauccuccggcuccugaauguggcuaaccuuaaccccgcagccagugcacauaagccaauguguggcuggucguaaugagcaauugugggaugggaccaacuacuuuggauguccguguuuccuguuuuucuuuuauucuugcuuauggugacaauauauauaguuuauauauauuggcaucaugggcgcacaaguuucaaggcaaaauguuggcacacacucaacacaaaauucuguuuccaacgggucuagucuaaauuauuuuaacaucaauuacuuuaaagaugcugcaucaaguggcgcuuccaaauuagaauuuucacaagacccaaguaaauuuacugacccgguaaaagauguuuuagagaaagguauuccaacuuuacaauccccaacuguagaggccugcggcuacucagauagaauuauccaaauaacuagaggugauuccacaauaacaucucaagauguggccaaugcagugguaggguaugguguguggccucaguauuuaucaucacaggacgccacagcuauagacaaacccacucaaccagacacauccuccaaucgcuucuacacuuuagagagcaaaguguggacucgaacaucaaaaggauggugguggaaguugccagaugcacucaaagauaugggugucuuuggugaaaacauguuuuaccacuuucuggggagaucuggauauacuguacauguacagugcaaugcuagcaaauuucaucaagguacuuuacuaguugcaaugguuccagaacaucaauuggcuagugcuagcgcuggaaaugugacugcuggauacaauuacacccacccuggugaagcagguagggauguuggccaaaauagagaugcuaauuacaaacaaccaagugaugauaacugguuaaauuuugaugguacucucuuagggaauuugcugauuuuuccucaccaauuuaucaaucuuagaaguaacaauucugcaacaaucauaguaccauauguaaaugcagugcccauggacucuaugcuuagacacaauaauuggagcuuacucauaauacccauuaguccucugaauagugauccauuggcaacagcuaaggucccaauuaccauuucaauuaguccuaugugugcugaauuuucuggagcacgagcuaaaccaguggcugugggccaaggauugccaguuuaugucacaccagguucuggucaauuuaugacaacagaugaucuccaauccccaucggcucugcccugguaucacucaacuaaagaaauuuuuauaccuggugaaguuaaaaauuuaauugagaugugccagguugguacccuaauaccugugaauaauaccaacgcuaacaucaagaaugugaguauguacacuguccaacuaacuagucaaacagaucuggcccaagaaaucuuugcuauaaaaguggauguugcaucccaaccacuuucaaguacucucuugggugaaauauguaguuacuacacacacuggacugguaguuugcguuuuaguuucauguucugugguacagcaaacaccacccucaaauuacuauuagcuuacaccccaccugguauaaagaaaccugagaguagaaaacaagcuaugcuaggcacucauauugucugggaugugggauugcaaucaacuauaucacuaguagucccauggguuagugcuagccauuuccgauacaccacuccagauaauuacucugcugcaggguauauaacauguugguaccagacuaacuuuguauuuccacccaacacuccuaacucugcagauauguuaugcuuuguuucugcuuguaaagacuuuugcuuacgcauggcaagagauacagacaugcauguacagaauguccccaucacacagaauccaguagagaauuauguaaaugauguucuuaaugaaguguuaguuguuccaaacauacaagaaagccauccaaccacaucaaacgcugcuccuguacuugaugcugcggaaacaggacacacaagcaguauacaaccugaggauacuguagaaacuagauaugugcaaacgucucaaacaagggaugaaaugaguguagagagcuuucuugguagaucaggaugcauacacauaucaacuaucacuguugacaaaaccauugacuaugacacuggacauuuuaauaaauggcaaauaacauuacaagagauggcacaaauuagaaggaaauuugaauucuucacauaugucagauuugauucagaagucacucuuguaccauguauagcaggaaaaggugaugacauuggucauauaguuaugcaguacauguacguuccacccggugccccucuacccacccgaagagaagauuacacauggcaaucuggcacuaaugcuucaauauucuggcaacauggacaagcuuuuccaagguuuucucuaccuuucuugaguauugcaucagcauauuacauguuuuaugauggauaugauggagauaaaucaagcucuagguaugguguuucaguuacuaaccacauggggacuuuauguucuagaauuguaacaaacagccaagaacauccaguugaggugacuacacguguauaucauaaagcuaaacacaucagagccuggugcccaagagcuccuagggcuguuccauacacacauaguuaugucacuaacuauaaaauuacaggacaggagacugaaauuuucuuaaaaccuagagcaacuaucaagacagcaggacccagugauauguaugugcauguugguaaccucauauacagaaaucuucauuuguucaauucagaaaugcaugaguccauucuaauaucuuauucaucugaucuagucauauaccgcacaaacacaaaaggugaugacuauauacccacuugugacuguacucaagcuaccuauuacuguaaacacaaaaauagauauuauccaauuaauguuacaagucaugacugguaugaaauacaagagagugaauauuacccaaagcacauccaguauaauuuguugauuggugaagguccuugugagccaggugacuguggugguaagcucuuauguaaacauggugucauagguaucauuacugcuggaggagagggucauguggcuuuuauagaccugaggcaauuucacugugcugaagaacaagggguuacagacuacauccauaugcugggugaagcuuuugguacaggauuuguagauagugugaaagagcagauaaaugccauaaauccaauuaacaauauuaguaaaaagauaauuaaauggaugcucagaauuauaucugcaauggucauaauuaucagaaauucaucugacccucaaaccauaauugccacacuuacauugaucggcugcucaggaucaccauggagauucuuaaaggaaaaauuuuguaaguggacucaguuaaauuauauacauaaagaaucagauaccugguuaaagaaauuuacugaaauguguaaugcagcuagagguuuggaguggauagguaacaagauaucuaaauucauagaauggaugaagucuauguuaccacaagcacaacucaaaguuaaguaucucaaagaacuuaaaaaacugaauuuucuugaaaagcaaauugagcaucucagaguugcagauucacaaacacaagaaaagauuaaaugugaaauugacacauuacacgaucugucaugcaaauuucugccacuguaugcaagugaagccaaaaggauuaagguacugcacaauaaauguaacauaauaauuaagcaaaagaaaagaugugaaccaguggcuguagugauccauggagaaccagguacuggaaagucuaugacaacaaacuuucuggcuagaaugauaacaaaugacagugauauauauucacuaccuccugauccuaaauacuuugaugguuaugaccaacagaguguugucauaauggaugauaucaugcaaaauccuaguggugaagacaugacuuuguuuugucagauggugucaagugucacauuuauaccuccaauggcugauuugccugacaaagguaagccuuuugauucuagauuuguuuuguguaguacuaaccacaacauguuagccccaccuacuauaacuucacuaccagcaaugaauagaagauucuuccucgacuuagacauagugguaaaugauagauauaaggauucacaggguaaacuaaauguuucugcagccuuucaaccaugugauguuaaugcaaaaguuggcaaugcuagauguuguccuuuuauuugugguaaagcugucacuuuuagagaccguaacacuugucaaaacuacacccuuucucagguuuacaaccacaugcuugaggaagauaagagacgacgccaagugguggacgucauggcagcuauuuuccaagguccaauaacucucgagggcccaccaccggcugccauaagugaccuucuucagucaguucgaacaccagaagucauuaaauacugugagaaaaauaaauggauaaucccagcugaguguaagguugaaagagacuugaauauagcaaacacuauuaucacuaucauagcaaauauuauuaguauuucugguauaauuuauguaauauacaaauuguuuuguacacuacaaggaccauauucaggagaaccuaaaccaaagaccaaaauuccagaaagacguguuguggcacaggguccagaagaggaguuuggaagaucacuaaucaaacauaauucguguauugugacaacucaaaaugguaaauucacagguuuaggaauuuaugauagaguauuaaucuuaccaacacaugcagaccccggucaugaaguacaaauagauggcaucacaacuaaaguggaagacucuuuugacuuauuuaacaaagauggaguuaaacuagagauuacaguacuuaaauugaaaagaaaugaaaaauuuaaggauauuagaaaguacauaccagagagugaggaugauuacccagauuguaacuuggcccuuuccgccaaucaaccagaaaccacuauaaucaaugugggagaugugguauccuaugguaacauucuccucagugguacucaaacagcuagaaugcuuaaauacaauuauccaacaaaaucaggauauugugguggcauuuuauacaaaauuggacaaguccuugggauccauguuggagguaaugguagggauggauuugcugcuaugcuguuaagguccuacuuuucugagacacaggguaaaguaauugucucaaaauuugcaaaagaauguggguuacccaguauucacacaccaagcaaaacuaaacuccaacccaguguauuuuaugauguguuuccggguaccaaggagccugcuguucuuucaaguaaugauccuaggcuagaaguagauuucaaugaagcuuuauuuucuaaguauaaggggaauaaugaaugugcuauaaauaaucauguuaaaguggcuauuucccauuacucagcacaacucaugacuuuagauauuaacccugaaccuauuucucuugaggauaguguuuuuggcauagagggccuagaagcuuuagaccucaacacuagugcaggguucccauaugugucaaugggcauuaagaagagggacuugauuaauaagcaaacaaaagauauaaccaagcucaaaguagcuuuagauaaauaugguguugauuugccaauggucacuuuccuuaaagaugagcuuagaaagaaggagaaaauuuccgcugggaagacccguguuauugaagcuaguagugugaaugauacuguauuauucagaacaacuuuuggcaaucuauuuuccaaauuucacuugaacccagguauuguuacaggaucugcuguggguugugauccagaaacauucuggucaaagauaccaguuauguuagauggagaguguauaauggcauuugauuacacuaacuaugaugguagcauacacccuaugugguuucaagcucuaaaagaaguucuaucuaacuuauccuuugaagcuaguuuaauagauagauuguguaacucuaaacauaucuuuaagaacauguauuaugaaguggaaggaggagucccaucagguugcucuggaacuaguauauuuaauacaaugauuaauaauaucaucauuagaacauuaguacuagaugcauauaaaaacauugauuuagauaaguugaaaauaauagcuuauggagaugaugugauuuucuccuauaaauaucagcuugacauggaagcaauagcuaaagaagguacuaaguauggauugacaauaacaccugcugacaaauccaguacuuuuacacagcuuaauuaugacaaugucacuuucuugaagagaggguuuaaacaagaugaaaagcaccaauuccuaauacauccaaccuuuccagucgaggagauucaagaauccauucgcuggacaaagaaaccaucucagaugcaagaacaugucuugucacugugucauuuaauguggcacaaugguagggauauuuacaagcaauuugaggagcgaauacguaguguuagugcuggucgcgcacuauauaucccuccuuaugauuugcucuugcaugagugguaugaaaaauuuuaaauuguuuagauauagaaguauuaaacaauuaguuuuuuaguuuuau

SEQ ID NO: 47 - RNA, 7129 nt, Human rhinovirus
uuaaaacuggaucuggguuguucccacccagaucacccaagugguguaguacucugucauuccggugacuuuguacgccaguuuuuacaccccccccuucuuguaacuuagaagaauuaaguucagaccaauaggaaaacgacaaaccagucguuuaaggucaagcacuucuguuuccccggucaaugcugauaugcuucaccaaggcaaaaacagcagcgaucguuacccgcaagacgccuacgcaaagccuaguaaugccuuugaagauauuugucuggucacucagguacaaucccaguacuagaccuggcagaugaggcuggaaaauccccacuggcgacaguguuccagccugcguggcugccugcacacccauacgggugugaagccaaauauuggacaaggugugaagagccccgugugcucgucuugaguccuccggccccugaaugcggcuaaccuuaaccccacagccauugcuugcauuccagcaagucuauggucguaaugagcaauugugggaugggaccgacuacuuuggguguccguguuucacuuuuuaccuuuuauuaugcuuauggugacaauauauagcguuauauauuggcaucaugggcgcucagguaucuagacaaaauguuggcacacacucaacacaaaacucagugucuaaugguucaagucugaacuucuuuaacauuaauuauuuuaaggaugcagcaucuaguggggcgucuaaacuugaguuuucccaagacccgagcaaguucacagaucccguuaaagauguauuagaaaaggguauccccaccuugcaaucaccuacaguggaagcuuguggauauucugauaggauuauucaaauuacaagaggagauucuacaauuaccucacaggauguagccaaugcaguuguuggauacgggguguggccucauuacuugacuccacaagaugcuacagcaauugauaaaccuacucaaccagauacauccucaaacagauucuacacauuagagagcaagacaugggcaucaaauucaaaaggcuggugguggaaauuaccugaugcacucaaggacauggggauauuuggccaaaacauguauuaccauuucuugggcagagcuggauauacaauucaugugcaguguaaugcuaguaaauuucaccaggguacacuaauaguugcugcuauaccagaacaucaguuggcuagugcucauaaggguaaugucacuacaggauacaauuacacccauccuggugaaaguggcagagauguuaguguggaggugcgugacacagcuaauuaccaacccagugaugaugcauggcuuaauuuugauggaacuuuauuaggaaacauaacaauauuuccccaccaauucaucaauuuaagaagcaacaacucugcaacuuugauacuuccuuaugugaaugcuguucccauggacucuaugcuuagacauaacaacuggagcuuggugauuauuccaauuuguccuuuggaaacugaaaguguggauacuacuguacccauaacuauauccaucagucccauguaugccgaguuuucuggagcucgugcaagaagccaaggucuaccaguacugcucacccccggaucuggacaauuuaugacaacugaugacuaccaaucucccagugcuuuaccuugguuucacccaacaaaagagaucuuuaucccagggcaagugcagaauuuaucagaauuaugucaaguugacacuauaaucccaauuaacaacacaacugcaaacacaacuaguguaaacauguauacacuucaauugaccaagcaaucaccaggacaugagguuuuugcaaugaagguugauauagcaucacaaccuuuggcaacaacaaugauuggagaaaugucuagcuauuucacacauuggacaggcagucuacgcuuuaguuucauguuuugugguucugcaggcacaacacuuaaguugcuuauugcuuacacucccccuggaaucgagaaaccaacaaagaggaaagaugcaaugcuuggaacucauguagugugggauguuggccuucagucuacuauuucaaugauuguaccauggguuagugccagucauuacaggaacacaacaccugauacauuuucucaggcaggguauauaacakgcugguaucaaacaucacuuguaacacccccaagcacaccccaaacagccagaauguugugcuuugucucaggauguaaggauuuuuguuuacgcauggccagagacacaaauuuacauaaacaaauaggagcuauaacucaaaacccaguugaacaauacauugaugguguguugaaugaaguuuugauugucccaaacaucaaugagagccaucccagcacuuccaaugcagcgccagcuuuagaugcagcugagaccggacacaccaguaauguacagccugaagauaugauugaaacgcgcuauguacaaaacacucaaacuagagaugaaaugagcauugagaguuucuugggcaggucugguuguauacacauaucagauuuaaaaguaaauuauacuggguauaaugaugaagguaacaauuuuaacaaauggcagaucaccuugaaagaaauggcucagauaagaaggaaguaugaauuauuuacauauguuagauuugauucugaaauaaccuuagugccuugcauaucuucucagagugcuaacauuggucauguuguuaugcaauauauguaugucccuccuggagcuccaauaccaaccaaaagaaaugauuacgucuggcagucaggcaccaaugcauccaucuuuuggcaacacggucaaccauacccucgauuuucucucccuuuccuuagcauagccucagcauauuacauguuuuaugaugguuaugacgguggaccugguucccguuauggcrcagyggugacaaaugauaugggcacuuuguguucuagaauugugacugaggaacacacaacacaggucaacaucacuacuaggguuuaucacaaagcaaaacaugucaaggcaugguguccacggcccccaagagcuguuggauauacacauacaaaugucaccaauuauaaaccauccaaaggagaauacacaccacccguuccgucacguaacagccccagagauauugucacaguaggaccuagugauauguaugugcauguuggaaauuugauauauagaaacuugcaccucuguaacucugacaugcaugauucuauacuaguuucuuauuccucugauuuagucauauaccgaacaaacacaauaggugaugacuauauuccaaugugugauuguacagaugccacuuacuauugcaaacacaaaaacagauauuacccaauuaaaguaaccagccaugauugguaugaaauccaagagagugaauacuacccaaagcacauucaauacaauuuacucauuggugagggacccugugagccuggugacugugguggaaaauuacugugcaagcauggaguaauagggauuauuacagcuggaggugagggacauguggcauuuauagacuugagacacuuccacugugcagaagaacaagguaucacagauuacauccauaugcuaggagaggcuuuuggcaacggauuuguagauaguguuagagaacaagucaaugcuauuaacccaauaaacaacaucagcaaaaaauuaauuaaaugguuacuuagaauaguuucugccaugguuauaauaauaaggaauagcucagauccacaaacaguaauugcaacacuuacauugauuggcugcucgggaucgccauggcguuuccuuaaggagaaauuuugcaaguggacgcaauuaaauuauguucauaaggaaucagauucauggcucaagaaauuuacagaaaugugcaaugcugccagaggucuugaauggauugguaauaagauauccaaauuuauagacuggaugaaaucaaugcugccccaagcucaacugaaagucaaguaucuuagugaacuuaagaaacuaaacuuguuagagaagcaaauugaaaauuuacgcggugcagauacaaagacucaagaaaaaaucaaguuagagauugauacacugcacgacuuaucaugcaaauuccuuccccuuuaugccagugaagcuaagagaaucaagguuuuguacaauaaguguaauaauguuauuaagcaaaagaaaaggagugaaccaguugcuguuaugauacacggcccaccuggaacugggaagucaauaacuacuaguuuucuggcuagaauguugacaaaugaaagugacauauauucacucccaccagacccaaaauacuuugauggauaugaucaacagagugugguuaucauggaugacaucaugcaaaacccagauggugaggacaugucuuuauucugccagaugguaucaagugugacauuuauucccccaauggcugacuugccagauaaagguaaaccauuugauucuagauuuguuuucuguagcaccaaucacucacuauuagcuccaccaacuauuacuucacucucugcaaugaacagaagguuuuucuuagaucuagauauaguugugcaugagagauauaaagacaaucaagggaagcuagauguaccaaaaucauucaaaccaugugauguggauaauaaaauuggaaaugcuaaauguuguccauuuauauguggaaaagcuguaucauucagggauagaaacacuugccaagaauacucacucugccagauuuacaauauaauaauagaggaagauaaacgccgcagaaaugugguggaugucaugacagcaauauuucaagguccaauaucaaugagugcaccaccaccaccugcuaucgcagacuuauuacaaucaguuagaaccccagaagugaucaaguacugugaggaaaauaaauggauaauaccagcagauuguaagauugagagagauuugaauuuggcaaauaauauaacaacuauaauagcuaaugugauuaguauagcagguauuauauuugucaucuacaaauuguuuugcacacuccaaggcccauacucuggugaaccaaagccuaaaacaaaagucccugagaggaggguuguggcacaaggaccagaggaagaauuuggacgcucccugauuaaacacaauacauguguggucacuacagaaaaugguaaguuuacagguuugggaauuuaugacaaaauaaugauauuacccacacaugcugacccugggaaaacaauccagauuaauggaauaaacacuaauguucuugauucauaugacuuguauaauaagaaugguguuaaacuagagauaacaguuguuaaguuagauaggaaugagaaauuuagggauauacgcaaauacaucccagagagagaagaugacuauccagauuguaacuuagcuuugguugcaaaucaacccgagccaacuauuauuaauguaggugauguaguauccuaugguaauauacuucuuaguggcaaccaaacagcuagaaugcucaaauauaauuauccuacaaaaucaggguauuguggugggguuuuguauaaaauagguaguguuuuagguauacauguaggcgguaaugguagagauggauuuucagccacacuaauuagaucauauuucagugaagcacaaggucagauuacaaaaagaacaaauguuaaugaguguggcuuaccaaccauacauacaccuagcaaaacuaaauugcaacccagugucuuuuaugauguauuugagggaacuaaagaaccagcaguauuaacagacaaggacccacgucuugaaaccgauuucaaaacagcucuauucucuaaauacaaaggaaacuuaccaugugagaugaaugaucauguuaaaguugcuguugcacacuauucugcccaguuaaugacacuugaaauugauucaagaaauaugaguuuagaggacaguguguuuggggccgauggucuugaagcacuugacuuaaacacaagugcaggguucccuuacauaagcaugggaaucaaaaagagagaccuuaucaauaacagcaccaaagacauauccaaacuuaaauuagcauuagauaaauauggaguggauuuacccauggucacauuccucaaggaugagcucaggaagaaagagaagaucucagcuggaaaaacccguguuauugaagcuaguagugucaaugauacaguagcauuuaggaugguguauggcaacuuauuugcagcuuuccauaaaaacccuggaauuaucacagguucugcuguugguugugauccagaaacuuuuuggucaaaaauccccgugauguuagauggugaguguauaauggcuuuugauuacacaaauuaugauggaaguauucacccaaugugguuugaagcccucaaaaugauacuacacaauuuagaauuugaacccaaauugauugacagguuguguaacucaaagcauauuuacagagacucauacuaugagguugaagggggagugccaucaggguguucgggaaccagcauauuuaacacaaugauuaauaauauaauuauaaggacuuuagucuuagaugcauauaaacauauagacuuggacaaacuuaagauuauagcuuauggggaugauguuauuuuuuccuauaaauaugcccuugacauggaagcaauugcccuggaggguguuaaauauggcuuaaccauuacaccagcagacaaaucugagacuuuuagacaacuugauuacagcaaugucacauuuuuaaaaaggggcuuuaagcaagaugcaaaauauccuuuucuaauccacccaaccuucccgauaaaagaaauucaugaaucaauaagguggacaaagaaacccucacaaaugcaggawcaugugcucucauugugccauuuaauguggcauaauggacaggaugucuacaaagaauuugaacggaaaauacgcagcguuagugcuggacgcgcgcuguauauuccuccguacgaguuacugcugcaugagugguaugagaaauucuaaucuguauauauagaaauaacaaauaauuaguuuguuaguuuuau

SEQ ID NO: 48 - RNA, 7162 nt, Human rhinovirus
uuaaaacuggguguggguugcacccacccacacugucuacggacguagugcucucauauuacgguaugcuugcacgccaguuuguuuccccuuuccccuuuuguaacuauagaagauugcacuuaaucucgaccaauaggcaguagugauccacacuacuuacggucaagcacuucuguuaccccgguaugcggagaauaggcucugaaaagggcugaagcuucaauuaucgucauccgcgcaauuacuacgcaaagcuuaguaacuucccaagaaauucuuugguuggccguuccgcugguaccccaccaguaggcuuggcagaugaggcugaguaauccccacuggcgacagugacucagccugcguggcugccuacacaccugguaacaggugugaagccauagaaaggacagggugugaagagccccgugugcuaauugugauuccuccggccccugaaugcggcuaaucuaaccccacauccaaugcgcauaagccaaugcguauuuggucguaaugggcaacugugggacggaaccgacuacuuuggguguccguguuucuuuuuauuccuuauaauuaguucauggugacaaguauaaguguuuauauuugucaucaugggcgcucaaguuucaaggcagaauguugguacccacucaacucaaaauacuguugcuaaugguucuagccuaaauuauuuuaauauuaauuauuucaaggaugcugcauccaauggcgcuucccgucuagauuuuucucaagauccuagcaaauuuacugacccagucaaagauguucugacaaaaggaauaccaacacuacaaucaccaucaguagaggcuuguggauacucagauagaauuauccagauaacucgugguaauuccacuauuacaucacaagauauagcuaaugcuguaguuggauauggugucuggccacaauacuuaucugaugccgaugcuaaugcuauugacaaaccaacgcacccagauacaucaucaaacagauucuacacuuuagacaguaaauuguggacaaguacaucaaaagguuggugguggaaauugccagaugcucuuaagaacaugggcauuuuuggagagaacauguuuuaucacuuuuuagguagagcuggauauacuguccaugugcaaugcaaugcuagcaaguuucaucaggguacccugguaauagcugccauacccgagcaucaauuggcuuauauugggaguggcaaugugagugugggauacaagcaaacacacccaggagagaaugggcguacaauugaugauacaagagugaauaccauguccaaucaaccaacugaugagaguugguuaaauugugauggcacgcuuuuggguaauauuacaaucuacccacaucaguuuauuaauuuaagaagcaauaauucugccacacucauuuuacccuauguuaaugcaguaccaauggauucaaugcuuaggcacaauaacuggagcauagucaucauacccgugucaccccuagauucucaagccacaggcaaugugccuauaacaaucucaauaagcccuauguguucugaauuuucaggugcaagaaaucaaucugucaaacagggcuugccagucaugcucacuccagguucugcccaguuucuuacuacugaugauacacaaucaccuucagcuuuaccauauuuccauucaacaaaagagauauucauaccagggaaagucaauaauuugucagagaucugucaaguagauucuaugauaccaauuaauaauacuauucccaugaacaauaaaauagguauguacacaguggagguugguguucaaacagaauugaaaacugaaaucuuugcuaucccuguagauguagcaucacaaccgcuggcaacaacacuuauaggugagauugccaguuauuacacacauuggacagguucccuuagauuuucuuuuauguucugugguacugcaaacaccagucuuaaauuauugauugcauauacaccaccaggaguugcgaaaccaaccacaagaacuauggcaauguuggggacccaucuugucugggauguuggccuacaauccacaguaucuaugguuguuccgugggucucugcuagucauuacagguucacaacuccagacacauacucacaagcugguuauaucacuuguugguaucaaaccaauuuuguaguucccccaaauacaccaacuacggcuaauauuauauguuuuguuucaggauguaaagacuuuugucuaagaauggccagagauacaaaccuacacucccagacagugaacauuacacaaaauccaauugagaaguauacagaagcucuacuuaaugaaguguugguggucccaaauauacaagcuaguaaugggcauacaucuaaugcugcaccagcuuuagaugcugcugaaacaggacacacuagucaaguucaaccagaggaugugauagaaaccagauaugucaucacagaucaaaccagagaugagaugagcguagagaguuuccugggcagaucugccugcauagcagucauucacacagaucuuaaacaugaccaugaaggccaaaauguuuacaaugacgaaggcagaaauuucucugcuugggaaauuacacucaaggaaauggcucaaauuaggagaaagugugaacucuucaccuauuugcgcuuugacucagaaauuaccauaguggcuacuauagcuggacaaggugaugacauagggcacauagugcuucaauauauguaugugccuccuggugguccuguuccaaaaacuagaaaagaugaagaguggcagacaggaacuaaugcuucagucuuuuggcagcauggucaaccauaccccagauuuacaauuccuuuugugaguauugccucagcauauuacauguucuaugaugguuaugagggugaugacccaaauucaaaauaugguucagugguuacuaaugcuaugggcacacuauaugugcgugugguuacagaaaggcaaaaacaugaagucaacauaaccaguagaauauaucauaaagcuaaacacaucagugcuugguguccacgaccuccccgagcaguagcuuaccaacacacauacaguacaaauuuuguuccuagcggaggucuuacaaaccuaagaacccaaauuaaaaccagagauaacauuaaaauuguaaacuuuggaccuucagauauguuuguacauauggaugaucuaauauacagaaauuuacaccugugugaaccugaaaaccuuaaugauucaguuucgauaugcuauucaagugauuuagucauauaccgaacaaacacaaaaggugaugaccugaucccuacaugcaauugcacacaagcuacauauuauugcaaacacaaaaacagauauuacccaauaaauguuaagaagcaugauugguaugagauucaagaaucagaauauuauccaaaacauauccaauauaauauacuaauuggugaaggcccauguaaaccaggugacuguggagguaaauuacuuugcaagcauggaguuauugguauacuaacugcugguggagaagggcauguggcuuucaucgaucucagggacuuccauguugcagacacucaaggaaucacagauuacguacauaaucuuggugaagcauuuggggcuggguucauagauaacauuaaggagcaaauacagguaaucaaucccauuaauaaaguuacuaguaaaauaguaaaauggauuauuagaaucauaucagcuauuacaauuauaguuaggaauaaugcagauccucacacaaucauagccacacuggcuuuacuaggguguucagggucuccuuggagguucauuaaagagaagguguguaauugguuacacuuaaauuacauacacaaagaaucagauggguggaucaagaaauuuacagagauguguaaugccgccaggggcuuggaaugguuagguaauaaaauauccaaauuuauugacugguucaaaucaauguuaccacaggcaaaacuuaaaguagaauauaucaagaaucucaaacagcucccuuuauuggaaaaagaaauugauggguugcgauuggcuucccaaaaacaacaacaggauuacauugacacucucaagaucaugcuugacucgucaaauaaauuccugccacucuaugcuugugagaauaagaggaucaaagagcuccuuaagagaagugaaaugaucuuacguacuucaaaaagaacagaaccaguugguguccuuuuccacggggaaccaggaacugggaaaucaauugccacauccauucuggcuaggaugcuaaccacugaaucagacauauacucccucccaccaucaccuaaauauuuugaugguuaugaccagcagagcguggucauaauggaugauauaaugcaaaacccaaauggugaagacaugucuuuauucugucagaugguuucuucaguaccuuucauuccuccaauggcugauuuaccugauaaaggaaaaccuuuuucuucagauuauguuuuagcaaguacuaaccauaaccuuuuacacccaccuacuauaacauguaccacagcuaugaacaggagauuuuucuuagacuuggauauaguagucaaagagguuuuuaaaauuaaccagggcagauugaaccugcagugcgcccuuaaaccauguaaagaugggaagauagguaaugccagauguugcccuuuaauaugugguaaagcaguagucuuuaaagauagaaacacaggggauuacuuaucacuagcaacuguguacaauaagaucacagaggagaacaggaacagaaaagaauugaauacuucauugcaggcuauauuucagggcccaauagauguagucaauaaaccacccccaccugcaauacuagacuuacuuaaaucugucagaaacccugaugucaucaaauacugugaagauaacaaauggauugugccagcugauuguaaguuagagagagaucugaauuaugcaaacuuggucauaucaaugauugcuaaugugguuaguauauuaggugugauuuauauaauuuacaaauuguucuguucucuacagggaccauacucaggugaaccuaaaccagcaaccagaaaaccagagagaagggugguaacacaaggcccacaggaagaauuuggacguagucuacucaaacauaaugcauguauaguuacuacugauaaugguaaauucacaggucuggguauuuaugauaaugucaugauauuaccaacucaugcugaugcugguaaaacuauagacaucaauggaauacagacaaggguugcagaugcauaugauuuauauaauucacaaggggugaaacuugaaaucacaguaguuaaauuagauaggaaugaaaaguuuagggacauuaggaaauauauuccagacacugaagaugacuacccugaaugcugccuagcuuuauuagccaaccaaccugaacccacuauaauagaagugggugauaguuguucuuaugguaacauccuacuuaguggcaaucagacagcaaggaugauuaaguacaauuacccaacaaaaucaggauuuuguggugguguccuuuauaaaauagguuuagucuuaggcauacauguuggaggcaaugguagaaaugguuucucagcaauguuauugaggucauacuucaaugaacaacaaggucaaauaaugucuagggcagauguuagggagaaaaaucuuuuuaguauacacacuccuacuaaaacgaaacugcaaccgaguguuuuccaugacacuuucccugggaaaaaggaaccugcaguucuauccucaaaagaccccagauugcagguggauuuagaagaaucaauuuuuuccaaauacaaaggaaauaaacagauugagaucacucagaauaugagaguugcagcugcacauuauacugcccaacucucaacauuagauauaagcccagaaccacuauccauggaagaaaguguguauggaauagaaggccuagaagcuuuagaucuccauacaagugcaggguauccauacacagcauguggcauuaaaaagaaagaucuaauaccuaaagauaaaaaccuaacaaaacuuaagcaggcaauggagaaguacggguuggacuugcccaugauuacauuuuuaaaagaugaacucagaaaaccagacaaaauuuacacagguaaaaccaggaucauagaagcuaguaguuugaaugauacaguccaauuuagaauggcuuuugguagacucuuuuccuccuuucaucaaaauccuggaauaauuacugguucagcaguagggugugauccagagaccuuuuggucgaagauaccagucaugcuugauggugaaugucuuauggccuuugauuacuccaacuaugaugguaguuugaacccaguaugguuuaagcuacuugcccagauucuugaaaacuugggauucccagggaauuugguacaaaaauuguguuacuccaagcacaucuuuaaaacacaauauuaugagguagagggagggaugccaucaggaugugcaggaaccagcauauuuaacacuaugauuaauaaugugauaauaagaacuuuagugcuagauacuuacaaauauguaaaucuagauaaauuaaagauacuagcauauggagaugauauccuguuuuccuaccccuaugaucuagacaugaaagaauuagcagaugagggauuaaaauauggauuaacuaucaccccugcugauaaaucagauguguuuaaaaaacuugauuuugguaaugcuacuuucuugaagagggguuuuagaccagaugaaaaacacaguuucuugauacacccuguguacccugaagaggaagugugggaguccaucagauggacuaaaaaccccagaaacaugcaagaacauguacuaucauugugucacuuaauguggcauaauggugaagauaaauaccaacacuuuguggccaagauuagaagcgucagugcuggucgcgcgcuuuauauaccaccauaugaacucuugcgccacgaaugguaugaaaaauuuuaaacugauauagaauauauaaauguuuaguuuauagauuuuau

SEQ ID NO: 49 - RNA, 7139 nt, Human rhinovirus
uuaaaacuggaucuagguuguucccaccuagaucucccauguggaguaguacucuauuauuacgguaauuuuguacgccaguuuuauauccccuuccccuuuuguaacuuagaagucgugaacacagaccaauagguggcgaucacccagaucgcuuaaggucaagcacuucuguuuccccggucaacguugauaugcuccaccagggcaaaaacaacggagaucguuauccgcaaggugccuacgcaaagccuaguaaccucuuggaggauauaugguuggucgcucagcuauaccccauaguagaccuggcagaugaggcuagaaacuccccacuggcgacaguguucuagccugcguggcugccugcgcacucuuaugagugcgaagccauauauuugacaaggugugaagagccccgugugcucaccuugaguccuccggccccugaauguggcuaacccuaacccugcagcuagugcaugaaauccaucauguugcuagucguaaugagcaauugcgggaugggaccaacuacuuuggguguccguguuucacuuuuuccuuuuauauuugcuuauggugacaauauauauauaacauauauauuggcaucaugggcgcucagguuuccagacaaaauguuggcacucacucaacacaaaaugcaguaucaaauggaucaagucucaauuauuuuaauauuaacuauuuuaaagaugcggcuucuaguggagcaucaaaauuagaauucucacaagaucccagcaaauuuacagacccagucaaagauguucuugraaaaggaauuccaacacuccaaucuccaacuguugaggcauguggguauucagauagaauaauacaaaucacaaggggugacuccacaauuacaucacaagauguugccaaugcagucguugguuaugguguuuggccacauuacuuaaguggugcagaugcuacugcuauugauaaacccaguagaccagauacaucaucaaauagauuuuauacccuugaaaguaaaguauggaccccaacuucccagggauggugguggaaauuaccggaugcacuuaaggauauggguauuuuuggagagaauauguuuuaucacuaucuaggaaggagcggauauaccguucaugugcaguguaaugcuaguaaauuucaccaaggcacccugcuggugguuaugauaccagaacaucaauuagcagccgcaagcacuggcaauguugcagcaggauacaauuucacacacccuggugaaaaagggagggaaguuggaagcccacgagaaacgcauccaaaccacccaagugaugacaguugguuaaacuucgauggcaccuuauuagguaaugcucuuauauuuccucaccaguucauuaaucuuagaaguaauaauucagcaacaauaauagugccauaugugaaugcagugccaauggauucaaugcucagacauaauaauuggaguuuagugauaauuccuguuaguccauugaaggcagaaaaugcuacuagugucauagucccaauaacuauauccauuagccccauguucgcagaauucucuggagcacgagcccgaccuguggcucaaggacugcccguguacauuacaccuggaucuggacaguuuaugacuacugaugaccugcaaucaccaucagccuuaccaugguaucacccaacaaaagagauuaugauaccaggcgaggucaagaauuugauagaaaugugucaaguagauacuuuaauucccauuaauaacacacaagcaaauuuaaagaaaaucaacauauauacaauacaauuguccaaccaaccuaagauggcugaggaaaucuuugccauuaaaguggacauugcaucacagccuuuaucaagcacucuacuuggacaaauugcuaguuauuuuacacauuggacugguagcuuacgcuuuaguuuuauguuuugugguacagcuaacacaacccugaaauuacuucuagcauacacaccaccaggcauaaggaagccugagaauagaaaacaggcaaugcuugguacucauauagugugggauguggguuugcaaucaacugugucccugguuguuccauggguuagugccagccauuuuagauacaccacaccagauacauacucagcagcuggguacauaacuugcugguaucagacaaacuuuguuuuuccuccaaacaccccaagcacagcugacaugcuauguuuuguuucagcaugcaaggauuuuugccuacgcauggcuagagauacugacaugcacguccaaaaugaugccauuacacaaaauccaguugaagauuauguugaggguguuuuaaaugaaguuuuaguaguaccaaacaucaaggaaagccauccaagcacaucaaaugcugccccaauacuagaugcagcugaaacaggucacacuaguaaaguacaaccagaagauacaguugagacucguuacgugcaaacaucacagacuagagaugaaaugagcauagaaaguuuucuagguaggucaggauguauccauauaucaacaauuaauguggauagcacaaaaacauaugaugaauccaaauuuagaacauggcaaauuacauugcaagaaauggcucaaaucagacgcaaauuugagauguucacauauguuagguuugauucugaaauuacauuagucccaugcauugcaggaaagggugaugauauaggacauauugugaugcaauacauguauguaccaccuggagccccaauuccagauaauagaacacacuuugcuuggcaaucaggaacaaaugcaucuauauucuggcaacuuggacaaccauucccaagauucucgcuaccuuuucuaggcauagcuucagcauauuacauguucuaugaugguuaugauggagauacuccugggucucguuauggaaccacaguaguuaaucauauggguacauuauguauuaggauuguuacaaaugaacagcaccauaauguugaaauuacuacuagaguauaccauaaggcuaagcauguuaaagccugguguccuagaccacuuagagcuguaccauacacaacuguaaacucaaccaauuauaugccucauacuggugaucugcaaauuuucauuaaaccuagaacagauccaaaaguagucaauguaggaccuagcgacauguuuguacaugcugguaaccuuauauauagaaaucuucacuuguucaacucagaaaugcaugauucagugcuagugucuuacucaucagauuuagucauuuaccgcacaaauacuacaggcaaugacuacaucccaacgugugauuguacugaugccacauauuauuguagacacaaagauagauauuacccaaucaaagugacaagucaugacugguaugaaauucaagagagugaauacuaccccaaacacauacaauauaaccuuuuaauuggugagggaccaugugagccaggugauuguggaggaaaguuacucuguaaacauggugugauugggauaauuacugcugguggagaaggucauguagcauuuauugaucucaggcauuuucacugugcagaggaacaaggcauaacugauuacauccacacgcuuggugaagccuuugguacagguuuuguagauagugugaaagaucagauaaacgcuauaaacccaaucaacaacauuaguaagaaaauaaucaaaugguuacuuaggauaauaucagcaaugguuauaauuauuagaaacucaucugauccacaaaccauaauagcaacauuaacacuaauugguuguucagguucccccuggagauuucuuaaagaaaaauuuugcaaauggacacaauuaaauuauauccacaaagaaucagauucauggcuuaaaaaauucacugaaauguguaacgcagcuagaggacuggaauggauagguaacaaaaucucaaaauuuauugacuggaugaaaucuauguuaccgcaagcucaauuaaaaguuaaguaucuuagugaguuaaagaaacuaaacuuccuagaaaaacaaauagagcauuuaagaguggcagauucaaaaacacaggagaaaauuaaacaugaaauugauacacuacaugaucuguccugcaaguuucucccuuuauaugcuagugaagcaaagagaauuaaaauuuuacacaauagaugcaguacaaucauuaaacagaagaagaggugugagccaguugcaguuguuauacauggugaaccugguacuggaaagucuaugaccacaaauuuucuagcuaggaugauaacaagugauagugacaucuacucucugccaccugauccuaaguacuuugaugguuacgaccaacagaguguggucauaauggaugacauaaugcaaaauccaaguggugaugacaugacuuuauucugucagaugguaucaaguguaacauuuauaccaccaauggccgauuuaccagauaagggaaaaccauuugauucuaaauuuguacuguguaguaccaaucaucauuuauuagcaccacccacaauaaccucguugccagcuaugaauaggagauuuuucuuagaucuagauauuguagugugugauaaauauaaagauucucagggaaaauuaaaugugucagcugcuuuucgaccaugugaugucaacacaaaaauaggaaaugcccgcuguuguccauucauuugugguaaagcuguaguuuuuagggaucguaacacaugccagacuuacacuuuggcccagguauacaauuuaaugcuugaagaagauaggaaacguacacaaguuauugaugucauggcugcaauuuuccaagguccaauuacucuugaaggaccaccaccagcagcaaucagugauuuguuacagucaguaagaacuccugaagugauuaaauacugugaaggcaacaaguggauaauaccugcugaauguaagguggaaagagaucuuaacauagcuaacacuauuauaacaauaauugcuaauaucauuaguauuucugguauaaucuaugucauuuacaagcuuuucuguacacuacagggaccauacucaggugaaccuaaaccaaaaacuaggauuccagaaagaaggguaguagcacaaggaccagaggaagaguuugguagaucccuaaucaaacauaacucaugcauuguaaccacaucaaauggaaaauucacugguuuagguauuuaugacagaacacucauaauaccaacacaugcugauccagguaaagaagugcaaauagauggcaucacaaccaaaguugaagauucauaugacuuauacaacaaagauggaguuaaauuagaaaucacuguacuuaaauuaaagagaaaugaaaaauuuaaagacaucaggaaguauauaccagaaaaugaagaugauuacccagauuguaauuuggcacuuucugcuaaucaaccagaaacuacuauuaucaauguuggagauguggugucauauggaaauauucuacucagugguacucagacagcaagaaugcuuaaguauaguuauccaacaaaaucaggguauuguggcggcauacuguacaaaauuggccaaauuauuggaauccauguuggagguaauggaagagauggguucucagcuauguuguuaagaucauauuuuucugaaacacagggccaaauugucgcuaagaaauccacgauugaauguaaucuuccuaguauacacacuccaagcaagacuaaacuacaaccuagcaucuuuuaugauguguuuccaggcaauaaagagccagcuguacuuucugaucaugaucccagacuagaaguugacuuuaaagaagcucucuucucaaaguacaagggaaauaauaaaugugaauuaaaugaccacauuaaaguagcaacuucucacuaugcagcucaauuggcaacacuggauauugauucaaacccuauuacgcuagaagacagugucuuugguguggaaggauuagaagcacuugaccuuaacaccagugcaggguucccauacguaaccauggguguuaagaaaagggacuuaauuaauaagcaaaccaaagauguuacuaaacucaaagcagcaauggacaaauaugguguagauuuacccaugguuacuuuccucaaggaugagcuuaggaaaaaggagaaaauuucugcugggaagacuagggucauagaagcuaguagugugaaugauacuauccuauuuagaaugacuuucgggaaucuuuucucaaaauuucaccuaaacccuggaguugugacagguucugcuguugggugugauccagaaacauucuggucgaaaaucccugugaugcuagacggagaaugcauaauggcuuuugauuauacaaacuaugaugguaguauacacccaaucugguuucaagcucugaaagaaguguugucuaaucuuaacuuugaacccaacuuaauagauagauuguguaaaucaaaacauauuuucaaaaacauguauuaugagguugaagguggagucccgucaggaugcucuggaacaaguauauuuaacacaaugauuaacaauaucauuauuaggacauuaguuuuagaugcauauaaaaauauugauuuagauaagcuuaaaauaauagcauauggggaugauguuauuuuuucauauaaauaucaacuugauauggaagcaauugcuaaagagggcacaaaauauggucuuacaaucacuccugcugauaaaucaagugaauucaaacagcuagauuauaacaaugugaccuuucuaaaaagaggauucagacaagaugagagauauacuuucuugauacauccaacuuucccaauugaagaaauacaagaguccauacguuggacuaaaaaaccaucucaaaugcaggagcaugucuugucauugugucauuuaauguggcauaaugguagggaugcauauaaacaauuugagcagaaaauacgcagugucagcgcuggucgugcacuguauauuccuccuuacgacuugcuccuccaugaaugguaugaaaaauuuuagauuguuuagauauagaaauaauaaacaauuaguuuuuuaguuuuau

SEQ ID NO: 50 - RNA, 7135 nt, Human rhinovirus
uuaaaacuggaucuagguuguucccaccuagaucucccaaguggagugguacacuauuaucacgguaauuuuguacgccgguuuuaucuccccuuaccccaaguaacuuagaaguauuacauaaagaccaacaggcagugauuauccagaucacuaaaggucaagcacuucugucuccccggucaaaguugauaugcuccaacagggcaaaaacaacugagaucguuauccgcaaagugccuacgcagagccuaguaacuaccuugaaauuacuugguuggucguuccaccaaaccccaugguagaccuggcagaugaggcuagaaauuccccacugguaacaguguucuagccugcguggcugccugcacacccuuugggugugaagccaaguaauggacagggugugaagagccgagugugcucacuuugaguccuccggccccugaauguggcuaaccuuaacccugcagcuagagcgcgcaaaccagcguguaucuagucguaaugagcaauugcgggacgggaccaacuacuuuggguguccguguuucuuuuuauucuuauauuugcuuauggugacaauauauaauuauuuguauauuggcaccaugggcgcucaagugucuagacagaauguuggcacucacucuacacaaaauucaguuucaaauggaucuaguuuaaauuauuuuaacauaaauuauuucaaggacgccgccucgaguggcgcaucaaaacuugaauuuucacaggaucccagcaaauucacagacccagucaaagauguucuugagaaggggauaccaaccuugcaaucaccuacaguugaagcauguggguauucugauagaauaauucagauuacaagaggggauucaacaauuaccucccaggauguugcaaaugcugugguugguuauggaguauggccucauuaccuuaccccccaagaugcaacugccauagacaaacccucacaccccgauaccucuucuaacagauucuacacuuuggaaaguaagacauggagugcugauucuaaaggauggugguggaaguugccugaugcacugaaagacauggggguguuuggacaaaacauguauuaccacuuccucggcagaagcggguacacaguucaugugcaauguaauucaaguaaauuucaucaaggaacacuaauaguugccaugauaccagaacaucagcuagcugcagcggagagagggaauguuacugcugguuacaacuucacccacccuggugagacugguagagauguugggaaaacugaacguguguaucagaacaaacaaccuagugaugauaauuggcuuaauuuugaugguacucuuuuaggaaacauaaccaucuucccacaccaauuuauuaacuuaagaagcaauaacucagccacaauaauaguaccauauguaaaugcagugccaauggauucuaugcuuaggcauaauaacuggagcuugguaaucauaccaauuuguccccuacagguugagggagcagguucaaacauaauaccuauuacaguuucuauuagucccauguuugcugaguuuucuggugcacgagcacggaaucaagguuuaccaguacuaacaacaccagguucuggucaauuuaugaccacagaugauuuccagucgcccagugcauuaccaugguuucaucccacaaaggaaauauccauaccuggccaaguuaggaauuuaauugagauaugucaaguagacacacuuauaccuauaaacaauacugggacaaacacuacaagcauuaauauguacacagugcaguuacagagacaggcugagcuuaugcaagaaauuuuugccaucaauguagacauagccucacauccuuuagcaaccacauuguuaggggaaauugcaaguuacuauacacacuggacaggcaguuuacgcuuuaguuucauguuuugugggucagcgagcuccacuuugaagcuucuucuugcauacacuccaccagggaucucuaaaccuacaaguagaaaggaagcaauguuagguacacauguaguuugggauguaggauuacaaucaacuauauccaugauaguaccauggauuagcgcuagccacuuuagaaauacaacaccugacaaauacucauuagcuggauucauuacauguugguaucaaaccaaucuuguggugccugcaaacacaccaaccacagccaauuugcuuuguuuuguaucugcaugcaaggauuucugucugcgcauggcuagggacacaaaccuucauaaacaaacggggcccauuacccaaaacccaguagaagauuauguagaucagguauugaaugagguccugguggugccaaauauaaagcaaagugaacccacgacuuccaauucagccccagcucuagaugcugcugagacaggucacacuagcaguguacaaccugaagauaugaucgagacucguuauguacaggcaucaaauaccagagaugaaaugagucucgagagcuuucuuggaaggucaggcuguauucauauaucaaaauugaauauugauuauaaugcauaugaugaaaguagggacaauuucacaauuuggaaaauaaauauaaaagaaauggcccagauuaggaggaaauuugaacuauucacauauacaagauuugauucugagauaacacugguaccaugcauagcugcagagagugacagcauugggcauguuguaaugcaauauauguauguaccuccaggagcaccauuaccaacaaaaagagaugacuacacauggcaaucagguacaaaugcauccaucuuuuggcaacauggacaaucauaccccagauucucacuaccauucuuaaguauugccucugcuuauuacauguuuuaugauggcuaugaugguggaccagauucacuauauggcaccauaguaacuaaugauauggguuccuuguguucgcguauaguuacugaagaacaugguucucgcguaaaaauugcaacgcggguguaucauaaggcuaaacauguaaaagcuuggugcccaaggcccccuagagcaguugaauacauacacacacauguuacaaacuauagaccagaaacaggugaggcucaaacgguuauaccuguuagagcagauguuagaacaauuagaaauguagguccuagugauuuguaugugcaugugggaaaucucauauacagaaaucugcauuuauuuaauucagaggccaaugauucagugcuaauaucauacucuucagacuuagucauauaccgcacaaacacuguaggcgaugacuauauaccaacaugugauugcacagaagccacuuauuauuguagacacaaaaacagauacuacccaauuagagucacuagucaugacugguacgaaauacaggagagugaguacuauccaaaacacauacaauacaauuuacuaauuggagaaggaccuugugaacccggugauugugguggaaagcuguuaugcaaacauggagugauagguauaauuacagcugguggugagggucauguugcauucauagaucuaagacacuuucauuaugcagaagaacaaggcauuacugauuacauacacauguuaggugaagcauuuggaaaugguuuuguagauagugucaaagaacaagucaaugccauuaacccaauaaauaacauaaguaagaaaauaauuaaauggaugcuuaggauaauuucagcuaugguuaucauaauuagaaauaguucagacccacaaacuauaauugcuacuuuaaccuuaauaggcugcucugguucaccuuggagauuccuaaaggaaaaauuuuguaaauggacacaauuaaauuaugugcacaaggaaucagacucuuggcuuaaaaaauucacagagaugugcaaugcagcaagaggucuugaauggauagggaauaaaauaucuaaguuuauagauuggaugaagucuaugcuaccacaagcacaacuuaaaguuaaguauuugagugaauugaagaagcuuaauuuauuagaaaaacaaauugacaaucugcguugugcugacacuaaagugcaagagaaaauaaaauuugaaauagauacacuucaugauuuaucauguaaauuccucccauuauaugcuagugaagcuaagaggauuaaaauauugcauaauaaaugcugcaauauaauuaaacagaaaaagagaagugaaccaguugcaaucaugauacauggcccaccuggcacuggaaagucuauaacuaccaguuuccuugcuagaaugauaacaaaugaaagugauauuuacucacuuccaccagaucccaaauacuuugaugguuacgaucaacagaguguuguuauaauggaugacaucaugcaaaacccugguggugaggauaugucuuuguuuugucaaauggucucuaguguuacauuuauaccuccaauggcagauuuaccggauaaaggaaaacccuuugauucaagguuuguauuuuguagcacuaaucacucacuuuuagccccuccuacgaucacaucccuuucugcaaugaauagaagguucuacuuagauuuagauauuguaguuaaugagaauuauagagauacacaagggaaacuaaaugugccaaagucuuucaagccaugugacauagauaacaaaauuggaaaugcaaaauguugccccuucauauguggaaaagcaguuguguucaaagaucguaacacaugucagacauacacacugugccaaauauacaauaugauuauugaagaagacaagcggcgcagaaaugucauugaugucaugacugcaauauuccaaggucccauaucaaugaacuuaccaccaccaccugccauaacugauuuauugcagucaguaagaacuccagaaguaguuaaauacugugaagauaauaauuggauaauuccugcagaguguaaaauagagagagauuuaaaucuugcuaauaacauaauagcaauaauugcaaacaucauuaguaucgcagguaucauauuugucauauacaaguuguuuuguucuuugcagggaccauacucaggugaaccuaaacccaaaacaaaaaucccugaaagaagagugguggcccaggguccugaggaagaauuuggccgcucauuaaucaagcacaacacauguguggucacuacagacaaugggaaauucaccggucuggguauauaugauagauacuuaaucauaccuacacaugcugauccuggaaagacaguacaaauuaaugggauuauaacaaauguuacugauucauaugaucuacacaauaaagaggguauuaaacuugaaauuacaguuauaaagcuggacagaaaugagaaauucagggauauacgcaaguauauaccugaaagagaggaugauuacccagacuguaauuuagcucuuguagccaaucagguagaaccaacaauaaucaguguaggugauguuguaucauauggaaacauauuacuuagugguaaccagacagcuaggaugcuuaaauaucauuauccaaccaagucaggauauuguggaggagugcuuuauaaaauagguaguguuauaggaauacaugugggggguaaugguagagauggauuuucagcaaugcugcuuagaucauauuucagugaaacucaagggcaaaucacuagcucgagaaauguuaaagaucuuggauacccaaccauacacacuccaaauaaaacaaaauuacaccccaguguuuuccacgauguguuuaagggcaccaaagaaccugcaguuuuaucagauaaagauccacguuuagagacugacuuuagaacaucuuuauucucuaaauacaaagguaauguagaaugugaauugaacgaccauaugaaaguagcuauagcacauuauucugcccaauugaugacccuugauauaaaucccaguaauauaacuauagaagauaguguauuugggacugauggauuagaggcuuuagauuuaaauacaagugcaggauuucccuauauuaguauggguauuaagaaaagggaccucauuaacaacucuaccaaggauauuucuaaacuuaaaauagcauuagauaaguauggaguagauuuacccaugguuacuuuccuuaaagaugaacuuagaaagaaagagaaaauaucuucugguaagacuaggguuauagaggcuaguaguauuaaugacacaauaacauuuagaaugaccuauggaaauuuauuuucaugcuuucacaaaaauccaggggucguuaccggcucagcaguggguugugacccugaaaccuucuggucaaagauuccuguaaugcuggauggagauugcauaauggcauuugauuacacaaauuaugauggcagcauccacccugugugguucgaugcacucaaagaagugcuaaaggaucuacaauuugaacauagauuaauugacagauuguguaacuccaaacacauauucaaggauuccuacuaugagguugaggggggggugcccucgggguguucaggaaccaguguauuuaauacaaugauuaauaacauaaucauaaggacuuugguuuuagaugcauacaagcauauagauuuggauaaguuaaagauaauagcuuauggggaugaugugauuuuuucuuacaaauacccuuuggauauggaagccauugcaauggaagggaagaaauauggguuaaccaucaccccagcagauaaaucagauaccuuuaagaaauuggauuaugauagugucacauuucugaagagagguuuuaaacaagauuccaaauaucccuucuugauacacccaacauuuccaguaaaugagauacaugaaucaauuagauggacaaagaaaccaucucagaugcaggagcacguccuuucacugugucacuuaauguggcacaauggacgugauguguacaaagaguuugaacguggaauacgcagugucagcgcuggucgugcacuguacauuccaccuuaugagcucuugcugcaugagugguaugaaaaguucuaauucuuuauauauauagaaguaauaaauauguaguuuauuaguuuuau

SEQ ID NO: 51 - RNA, 7164 nt, Human rhinovirus
uuaaaacuggguccagguuguucccaccuggaucuccuacguggaguuguacucuauuauuccgguaauuuuguacgccaguuuuaucuccccuaccccucuauguaacuuagaaguuuaugcacagcggccaauaggugacauuuauccaaaaugucaaaggucaagcacuucuguuaccccgguuagaauugauaugcuccaacagggcaaaaacaauuuugaucguuauccgcaaggcaacuacgcaaagccuaguaccauuuuugaugaugugugguuggucgcuccacugugaacccgacaguagaccuggcagaugaggcuagaaauuccccacugguaacaguguucuagccugcguggcugccugcguacccuuuugcggguacgaagccauacauuugacaaggugugaagagccccgugugcuugccuugaguccuccggccccugaauguggcuaaccuuaacccugcagcuagugugcacaauccagugcauggcuagucguaacgagcaauugcgggaugggaccaacuacuuuggguguccguguuucuuguuuuucuuuuauauuugcuuauggugacaauauauacauaauauauauauuggcaccaugggcgcucagguaucuagacaaaauguuggaacucacucuacucaaaaugcugugucaaaugguucaagccuaaauuauuuuaacauuaacuauuuuaaggaugcagcuucuaguggugcuucuagauuggauuuuucacaagauccuaguaaauuuacagacccagucaaagauguucuaaugaaagauauaccaacauuacaaucaccaucuguugaagcauguggguauucagacagaauuauccagauaacacguggaaacucaaccaucacuucacaggacauagcuaaugcuguuguugccuaugguguuuggccacaauacuugucuccugaugaugcuagugcaauugacaaaccaacucauccagauguuucauccaacagauucuauacguuggauagcaaagaauggacuaaugaaucuaaagguuggugguggaaguuaccugaugcucuaaagaacaugggcauauuuggugagaaucuguucuaucauuuccuuggcagagccggauacacaguccauguacaauguaaugccaguaaauuccaucaggguacuuuagugguggcagcaauaccugaacaucagcuagcuuacauagguaaaggaaaugucacaguuggauacaaucacacucauccaggagagaaggguagaagaauuggugguuuuauagauaaugagaguaggcaacccagugaugaaaauugguugaauugugaugguacucuacuagggaacauaacaauauacccucaucaguacauuaaucucagaaguaacaacucugcaacacugauuuuaccauaugugaaugcaguacccauggauuccaugguuagacacaauaauuggaguauagugauuauaccgaucucacaacuuaaguuugaaccgggagcuacuccauuuauaccuaucacauuauccauaaguccaauguguucagaauuuucuggugccagaaacaacaccacacaaggauuaccuguaaugcuaacaccagguucagcacaguuuuuaaccacugaugaugcacaaucuccaucugccuugccuuauuuccacccuacaaagaaaauauucauaccaggugagguuaagaauuuaucagagauuugccaaguagauuccaugauaccaauuaacaauacaccuacugcaaggaacucaaccaacauguauacuguucagguagggcaacaaacaaaaguggcucaggagguuuuuuccauauuaguggauguggcaucacaaccauuagcaaccacucuaauaggugaaauugcuaguuacuacacucacuggacugguagucucagauuuaguuuuauguuuuguggaacagccaauacaagucucaaauugcugauugcauauacaccaccagggguaccaaagccuggguccagacaaaaggcaaugcucucaacacauguaguuugggauguuggacugcaaucuacaguuuccaugguaguaccgugggugucagcaagucauuauagguauacaacuccagauaccuauucucaagcuggauacaucacaugcugguaucaaacuaacuuuauaguuccaccaaacacaccaaauacugcagauaucauauguuuuguuucugguugcaaagacuucuguuuaaggauggcuagagacaccaacuugcauacucaagcaggugucauagaacaaaacccaguugaaaaauacacagaagccguucuuaaugagguccuugugguuccaaacauaccagcaaguaauacccaaacuucaaaugcagccccagccuuagaugcugcugagacuggacauacaaaccaaguccaaccagaagaugugguugaaacacgcuaugucauaacagaccagacaagggaugaaaugagcauagagagcuuccucgguaggucagguugcauugcaaucauacauacugacuuagaucacaaugaggaucaguacaaugcaccuggaaaaaacuucucccaauggaaaauuacaauuaaggaaauggcucaaauuagaagaaagugugaacuauucacauaccuuagguuugacucugagauuacaauaguagcaacaauagcugcucuuggaaaagauaauggccaugugguuuuacaguacauguaugugccgccaggggcacccauaccaaaaacuagagaugauuacacauggcagucaggcacuaaugcaucaguguuuuggcaacaaggacaaccuuaccccagauuuaccauuccauuuaugaguauagcuucagcauauuauauguuuuaugauggauaugaggaugacaaaggaaguguguauggaucuguuguuacaaaugauaugggcacauuauguguccguauugugacugagcagcagacacauagggucaaaauaaccagcagaauauuccauaaagcaaaacauauuagugcgugguguccaagagcuccaagagcagugcccuaccagcacaccagaaguacaaacuuaguaccaaaggaaggugauauuaaaacucauauuaaauuuaggaauacuguuaaagauuuggcauauccuccagaauuagcaaaccuuggaccaucugaucucuacguacacacuggaaaccucauauacagaaacuuacauuugugugaaccagaaaauuuaaaugauucaacacugauaugcuauucaagugaccuugucaucuaccgaacaaauacaacaggugaugacauaauuccuacaugugauugcacacaggcaaccuauuacugcaaacacaaagacagauauuaucccauaaaugucagaaaauaucagugguaugaaauucaggaaucagaauauuacccaaaacacauucaguacaacauucugaugggugaagggccuugugaaccaggugauuguggugggaaacuccuguguaaacaugggguuauaggaauaguaacagcaggaggugauaaccauguugcauucauagaucugagggauuuucaaguugcugaagaacaggguauaucagauuauguacacacucuuggugaagccuuuggagcugguuuuguagauaacauuagagaacagauucagacaaucaauccaauuaauaaaauaacaagcaaaauagucaaguggacaauaagaauaguuucagcuaucacuauuauaauuagaaacaacgcugauccacauacuauuguagccacucuagcucuauuaggcugcucaggcucaccauggagauuuauuaaggaaaagauuugcaacugguuacagcuaguguacauacauaaggaaucagauggauggauuaagaaguuuacagaaauguguaaugcagcuagaggccuugaaugguuagguaacaaaauauccaaguuuauugauuggcuuaaguccauguuaccccaagcaaaacuaaaaguggaauucauuaaaaacuugaaacaguuaccuuugcuagaaaaacaaguugaugggcugagacuugcuacacaaaaacagcaacaggauuauguagacacuuugacacugauguuggauucaucaaauaaauuuuuaccuuuguaugccacugaaaacaaacgcaucaaagaauugcuuaagcgaagccaaaugauucuucgcacaucaaagagaacagaaccaguuggaguaauauuccauggugaaccugguacugguaagucuauaaccacaucaauccuugcccgcaugcucacaaccgaaucagacauauauucccuaccuccuuccccaaaauacuuugauggauacgaucagcagaguguggucaucauggaugauauaaugcaaaauccuaguggugaagauaugucauuauuuugccaaaugguaucaucagugccauuuauaccaccuauggcagaucuaccagacaaaggaaaaccauuuuccucagauuacguguuagcaagcacaaaucacacucuacuccacccaccaaccauaacauguacaacagcuaugaauaggagauuuuuccuugauuuagacauaguugucaaggauaaauacaaacuuagucaggguaagcuuaaucuacaaugugcucuuaaacccuguaaugaagggaaaauuggaaaugccaamugcuguccuuuaaucuguggcaaggcauuacaauuuagagauagaaauaauggugaucacuuguccuuggccacaauauauaacaggaucacccaggaaagcaaaaauaggaaggauuuaacaaacuccuuacaagcaaucuuccagggacccauagauguaguaaauaaaccaccuccaccagccauaauagacuuacuuagaucaguuagaaacccagaugucauuaaauacugugaagaaaauaaauggaugauaccaucagauugcaaacuugaacgugauuugaacuaugcaaauuuaauaauaucuaugcuagcaaauguuaucaguauaauggguguaauauacauuauauauaaauuguuuugcucacuccaagguccauauucaggcgagcccaaaccagucacaaagaaaccagaaaggagaguggucacucaaggaccacaggaagaauuuggaagaaguuuaauuaaacauaacacuuguguugugacaacaaguaaugggaaauucacuggauuaggaauuuaugauaacauuaugauuauuccaacacaugcugaugcagguaaagaaguggagauagauggaauuaaaacucaaauugaugaugccuaugacuuauacaacucccaagggauuaaguuagaaauuacuguucucaaauugcacaggaaugaaaaauucagagauaucagaaaguauauaccagaaucugaagaugauuacccagaaugucauuuagcauuaguugcuaaucagcaggaaccuaccauauuggaaguuggugacugcuguucauauggaaacauacucuugagugguaaucaaacagcuaggaugaucaaauacaauuacccaacaaaaucaggguuuugugguggagucuuauacaaaauagggcuaguucuggguauacauguuggaggaaauggcagagauggcuucuccgcaauguuauugagaucauacuuuacugaacaacaggguaagauaguaucaaaaguuaguguuaaggaauguaauuuguauagcauacauaccccaucaaacaccaaauuacaacccaguguuuuuuaugauguuuucccugguaguaaagaaccugcuguccuaucugguaaggauccuagauuagaggucaacuuagaugaauccauauuuucaaaauauaaggguaaugaacuaguugaaaucacgcaaaacaugcuaacagcagcugcccauuacacagcccaacuuucuacucuagacauagacccaacaccauuaagucuggaagagaguguguacgguauagaagguuuagaggcacuggaccuacacacuagugcugguuacccauacacagcaugugguauuaaaaagaaagauuuaauaccaaaagacaggaaucuaacaaggcuuaagugugccauugagaaauaugguuuggauuuaccuaugauaacuuucuugaaagaugaacucagaaaaccagagaaaaucaaaacuggaaaaacuagaauaauagaagcuaguaguuuaaaugacacaauacaauucagaauggccuuuggcaauuuguucuccaaguuucaccaaaacccaggcauugucacaggaucugcaguggggugugauccugagguguucuggucaaaaguaccagugaugcuagauggugaaugccucauggcuuuugauuacacaaauuaugaugggagucuuaauccagucugguuuaaauuacuuaauagaguacuaacugaauugggcuuuccaggugauuuagucaauaaauuguguaauucuaaacacauauacaaaacuauuuacuaugaaguugagggugguaugccaucaggaugugccggaacuagcauuuuuaauaccaucauuaacaauauaauaauuagaacucugguauuagacacuuacaaauuuauaaaucuggauaaacuuaaaauauuagcauauggugaugauguaauuuuuucauauccuuaugaucuugacaugaaagaacuugcaagugagggcaccaaauauggcuuaucuaucacgccagcugauaaaucagacacauucaagaagcuagauuauagcaaugccacuuuccuuaaaagggguuucaagcaggaugaaaaguacagcuuccuuauccauccuauuuacccagaaacagaaguuugggaaucuauaagguggacuaaaaaccccaggaacaugcaagaacauguccuaucccugugucaucuuauguggcacaaugggaaagaaaaauauaaacacuuuguggacaagaucaggaguguuagugcuggucgcgcacucuauauaccaccauaugaggucuugcuccacgagugguaugaaaaauuuuaaucagauauagaaauuauaaaugauuaguuuauagauuuuau

SEQ ID NO: 52 - RNA, 7211 nt, Human rhinovirus
uuaaaacagcggauggguaucccaccauccgacccacuggguguaguacucugguacuuuguaccuuuguacgccuguuucucccucccuucccaaccuaaacaauccuuguaacuuagaagguuucgauuaucgcacaauagggacuauugcaaccagcaauagucagugcaagcacuucuguuuccccggagcggaguguagauggccaccgcugucaaaagcucuuaaccguuauccgccaguuaacuacgcaacggcuaguagugccuuguugcuuuuauggcguucgaucaggcgagauuuacccccucgcuagucuggucgaugaggcugagaauuccccacgggcgaccgugucucagccugcguggcggccagcccagccuuugcugggacgccuugauugcgacauggugugaagacccgcgugugcuuaacugugaguccuccggccccugaaugcggcuaaccuaaacccuggagccuugaaacacaacccaguguucgcaaggucguaacgagcaauuccgggacgggaccgacuacuuuggguguccguguuuccuuuauucuuucaauuguucuuauggucacaauauaaguguuauauugugaucaugggugcacaagugucuacacaaaagagcgguucacaugagaaucaaaacauccugacaaacgguucaacacaacacuuuacuguuauuaauuauuacaaggaugcagcaaguucaucaucugcuggucagucuuuuucaauggauccaucaaaguuuacugagccuguaaaggauaucauguugaagggugcaccugcucugaacuccccaaauguugaagcgugcggguauagugauagggugcaacagaucacacuuggaaauucaacaaucacaacccaggaggcagcuaaugcaguaguggcauaugcagaauggccuaguuacuuaacagauacugaugcaagugauguaaacaaaaccucucagccugauacgucaguaugcagguucuacacccuagagaguaaaacauggacaaauuuaucaaagggauggugcuggaagcuuccagaugcacucaaagaaauggguguauuugggcaaaacauguuuuuccacgcacuagggagaacagguuauacuauucauguucagugcaacgccaccaaauuucauagugguuguuuguugguaguggucauaccagagcaccaauuggcaucgcauacagaaggaaauguuucuguuaaguacaaauauacccacccaggugagacaggaauaaacuugagugacgcaguugcgacagggggugcgucacaugauccaguguacucaaugaauggaaccuugguaggaaaccuuuugaucuucccacaucaguuuauuaaucucagaaccaauaauacugcuacacuuauuguacccuauauaaauucagugcccauggauucuaugacaagacacaauaaugugucauuauugguuauuccaguuguuccauugacuaaucccacaggaauguccacaacaauaccuauaacagugaccauugcacccaugaacacagaauucucaggcauuagaucuagagcuguaguaccacagggcuugccaacauuaacuaccccaggaucuggacaauuuuuaaccacagaugacaggcagucaccuagugcaaugccaaauuaugaacccacuccuccaauucacauuccaggagagguucauaaccuucuagaaaucauacagguugacacucugauccccaugaacaacauaggugccagagacacuauggaugaguaucgaaucccacuugaaguuaacaaagugaaugagcaaauauucggcaccagacuguucauaggagaugggguguucaaaaccacguuauuuggagagauugcacaguauuacucacacuggucaggcuccauuagaauauccuugauguacacaggcccagcauuaucaagugcuaaauugauucuagcauauaccccaccaggaacuaaggggccuaaaaccagaagagaggcaauguugggcacacauguggugugggauguuggauuacaaucaacaguaguaaugaacauacccuggacaucugguguacaauucagguacacagauccggauacuuacaccagugcaggccaccuuucuuguugguaucagacaucccuuauuuugccgccugacacagcaggaacuguuuaccucuuagcauucauuagugcauguccagauuuuaaacuaaggcuuaugaaagauacacaaacaauaucacaaacagaagcccucacagagggguugggggaagagcuggaagaaguuguuaucgauaaaaugaaacaggugacagcuucaguccagaguggauccaagcauacacaaaagguaccagcacuuagugcuagcgaaacuggggccacacuucccaccaaucccucugauaguguugaaacaaggaccacuuacaugcauuucacugggucagaaacuacuauagaaaacuuuuuggguaggucagcuuguguacacauaacagaaauccagaauaaaaagcccauagaguccuuagaagaagggaaaaacacccacaagggacagaugcuauuuaaugauuggaaaauaagucuauccagccuaguacaacuuagaaagaaauuggaacucuuuacuuaugugagguuugauucugaguacaccauacuagccacugcgucacaaccgaacgcaucugaguaugcuaguaacuuaacaguacaggcaauguauguuccuccaggugcaccaaaucccguuaaauggaaugauuauacauggcagagugcuucaaacccuagugucuucuuugagguuggcaagacagccagguucaguguaccauucacuggcauugcaucagccuauaauugcuuuuaugaugguuacucacaugacaaugaagacacgcaguauggcauuaauguuuuaaaccacaugggaagcauugccuucagaguugugaaugaucaugaugaacacacaaccauaguuaaaauuagggucuuccauagagccaagcauaucagagcauggauaccuagaccacccagagcacuaccauacaccucuauaggcagaaccaauuuuccaaauacacaugguaaagucaucacuagaagaaacaagaucaccacauauggagguagcccuagauuuggcgcagucuacaccuguaacuauaaaauaaugaauuaucauuuaaugacacaugaagaucacuuaaaccuucuaaccccuuacuaugacagagaccuggcagugguagcaacgggggcacaagggucagagauaguuccccauugcaauuguacuucuggaguuuauuacucccaauauuacaggaaauauuauccaauaauaugugaaaggcccacaaacaycuggauugaaggaggaaacuauuaccccaguagauuucaaucgggagucaugaaaggaauuggaccagcugaaccuggagacuguggcgggauuuugcggugcauacauggcccaauugguuuauuaacagcagggggaagugguuaugugugcuuugcagacauuaggcaguuagauuuuauugcugagacacaagguauuacugacuacauaacaaacuugggaaaagcauuuggugugggcuuuacagaccagauaucagcaaaagucacggaacuucaagacagugucaaagauuacauaaauguuaagauucuuuccaagguuguuaaaaugauuucagcauuaguaauuauauguagaaaccaugaugauuugaucacaguuacugcuacuuuggcuuugcucgggugugauggcucacccuggagguuccucaaaauguacauaucaaaacauuuccaggugcccuauauagagaggcaagcaaaugauggcugguucagaaaguuuaaugaugcuugcaaugcugcaaaaggcuuggaguggauagcuaauaaaaucucaaaacuuauagaaugggugaaaacaaaaauaaucccccaggcaaaggagaaauuggacuuuuguaaaaggcuuaaacagcuggacauuuuggaaagacaagucacaacaaugcauguuuccaauccaacacaggagaaaagagagcagcuuuuuaauaacauucuaugguuggaacaaaugucccagaaguuugcaccauuauaugcaguagaagccagaagawucaaggaaaugaaaaugaagaugaugaacuauauacaauuuaagucaaaacauagaacugaaccagucuguguucuaauacaugguuccccuggaucaggaaaaucgcuaaccacaucaauuauugguagggcuauagcagaaagauuuaaguccacaguuuauucacucccuccagacccaaagcauuuugauggauaccaacagcaggagguugugaucauggaugauuugaaccaaaauccggacggucaggacauuaguauguuuugccaaaugguuucaucaguugauuucauaccacccauggcuagcuuagauaacaaaggaauccuguuuacuagcaauuuuguucuugcgucaacuaauucaaacacacuuagcccuccaacaauuuuaaauccagaagcucuggucagaagauuuggauuugauuuggauauaugcuugcauacuucauuuacaaaaucaggaaaguugaacguagcaauggcuacagagcuuuguaaggacugccacaaacccaguaacuuuaacagguguugcccauugauaugcggcaaggccaucagucuuguagaucguucuacuaauguuagauacaguuuagaucaauuggucacagcaaucauaacugauuuuaauaacaaguugaagaucacagauucuuuagagauccuauuucaggggccugucuacaaggauuuggaaauagaugugcacacuacaccaccaccugaaugcauuaaugacuugcucaagucaguugauucugaagaacucagggaguauugcaaacagaaaaacuggcucauaccagagaucccaaccaacguggaaagagcaguuaaccaggcuaguaccauaauaaacacaauacugauguuugugaguacccucgggauucuuuauguaauauacaaauuauuugcacaaacacaaggcccauacucggguaaccccucacacacaaaauuaaagccgcccacauugcggcaagugguaguucaaggcccaaacacugaauuugccaugucccuacuuaggaaaaauauaguuacaaucacuacuuccaagggagaguucacagcauuagggguucaugauaggguuuguguuguaccaacucauucucaaccuggugaugaaguauuagucaauggacaaccaauuaaguuaaaagauaaauacaaacuacuagacccagaaaacacaaacuuggaguugaccauaguaguucuagacaggaaugaaaaauucagagauauaagagcauuuauagcagaggauccagaaggaguggaagggacuuuaguaauaaauuccaauaauuuuagagauaccauacuggagguaggacaauugaccuuugcuggccucauaaaccucaguagcgugcccaccaaucgcaugauacgcuaugaguacccuacuagaacuggacaauguggaggaguuuugugcucaacuggcaaaauuuacggaauccauguuggugguaacgggcggcaaggcuuuucugcacaguuaaagaaacaguauuuuguggaaaaacaaggagcgauuaccaccaaaagaaaugucagggaaguaggacuaaagccaauuaauacccccacuaaaacaaaacuccaccccaguguguuuuaugaaguuuucccagggucaaaggaaccugcuguguuagaugauucugaucccagacuggaagucaaucugcgugacucccuauucucaaaauacaaggguaauguugaaguggacaucacugaaaacaugcaaguagccauagaccacuacucaggccaguuacugucacuggauaucccaacagaugagaugucacucaaagaagccuuauacggcacagaugguuuagaacccaucgacaucaacaccagugcugguuacccauaugugagcuugggaauaaagaaaaaagacauacuaaacagagaaacucaggacaccucuaaaauggaacauuauuuggacaaauauggcauagauuuaccacuuguuacauacauuaaagaugagcuuagaggcaaagacaaaguuagauuagguaagaguagacuaauugaggcauccagcuugaaugauucuguuaacaugaggguuaaauuaggaaauuuguacaaagcuuuccacuugaacccaggggucauaacuggaucagcuguggggugugauccagauacguuuuggucugucauaccaugucuuauggauggucaacucauggcauuugauuacucaaauuucgacgccucacuaucaccagugugguucaagugccucgagcaagugcucacuaagcuuggguucaaacacuccaacuugauaaaaacaauaugcaacacacaccacauauuuagggaugaaauuuaugaaguugagggaggcaugccaucagguuguucagguacuagugucuucaauucaaugauaaacaacauaaucauuaggacauuaauauuagaugucuauaaaggaauagaucuugacaagcuaaaaguaauagcuuauggggaugaccuuauuguuucuuauccauuugaguuacaaccagaacuacuagcucaggcuggaaagggauauggcuugacaaucacaccuccagacaagucugaaaaauuuacaaaaacaacaugggaaaauguaaccuucuuaaaaagguauuucagaccugauucacaauaucccuuccuuauacauccagugaugccaaugcaagauauucaugaguccauucgcuggacacgugaucccagaaacacucaagaucacauacggucucuguguauguuggcuuggcauucaggggaagaggaguauaaagucuucacugacaaaauaaggucaacuagcauuggcaaaugcuuacuaaucccagaguacagcguuuugcgucgacgcuggcuugaccuguuuuaauaauauagauuuauaauuuguuuagaauuagaaauuuau

SEQ ID NO: 53 - RNA, 7161 nt, Human rhinovirus
uuaaaacugaguguggguuguucccacccacacugucuacggacguagugcucucauauuccgguauguuugcacgccaguuugccucuccuuuucccacguaacguuagaagcuuaugcacuaaaucgaccacuaggugagugauaaaccauaucauucuuuggucaagcacuucuguuuccccgguaugcagggaauaggcccuccccagggcugaagccuuaauuaucguuauccgcacauuuacuacgcaaagccuauuagcguucuggaaguucacuggcuggucguuccgcuagacuaacccgucuaguagaccuggcagaugaggcuggauaaaccccacuggcgacagugauccagccugcguggcugccugcacaccuggaaacaggugugaagcccaugaauggacagggugugaagagccccgugugcuaagugugaguccuccggccccugaaugcggcuaaucuaaccccacagcuaauacacacaaaccaguguggauuuagucguaauggguaacugugggacggaaccgacuacuuuggguguccguguuuccuuuuauuccuuuuauauugcuuauggugacagguauauagauauauauuuguuaccaugggcgcacagguuuccagacagaauguugguacucacuccacucagaacacaguugcaaauggaucaagucuuaacuacuucaauaucaauuauuucaaagaugcagcauccaauggggcuucucgauuagauuucucacaggauccaagcaaauucacugauccuguuaaggauguuuugauaaagggagucccuacuuuacaaucaccaucgguggaggccuguggauauucagacagaauaauucaaauaaccagaggaaauucaaccauaacuucucaggacaucgcaaaugcaguaguugcauauggaguuuggccacaauacuuaucagaugcugaugcaaaugccauagauaaaccaucacacccagacaccucuucaaauagauucuacacacuugauaguaaacucugggagaauggcucaaaagguuggugguggaaacuuccagaugcuuugaaaaacauggguauuuuuggagaaaauauguuuuaccauuucuuagggagagcugguuauacaguucauguucaguguaacgcuaguaaguuucaccagggaacuuuaguaguagcugcuauaccagaacaccaacuggcuuacauugggucaggaaaugugaguguaggguauaggcauacccacccaggagaacagggccgugugauaggcacacgugagaauagaaacacaaaucaacccacugaugagaguuggcuuaauugugaugguacauuauuaggaaacauaaccauauucccacaucaguucauuaauuuaagaaguaauaauucagccacacuaauucuaccuuauguuaaugcagugcccauggauuccaugauaagacauaacaauuggaguauuguuauaauaccaauuuccccucuagaagcuaauguaacagacccaguuccuauaacgaucucuauaaguccaauguguacugaauucucaggugcucgaaaucagucaguuaaaauacaaggacuaccaguuauguugacuccaggaucagcacaauuucuuaccacugaugaugcacaaucacccucagcuuugcccuacuuucacccaacaaaagaaauauuuauaccaggagaagucaagaaucuaucagaaaucugccagguagauucaauaauaccaauuaacaauguugaagccagaaagaacucuauaaguauguacacaguagagguuggugucaaaacaacucuagcagaagaaguuuucgcuauaccuguggauguggcaucacaacccuuggcaacaacucuaauuggagaaauauccagcuauuauacccauuggacagguucuauucguuucucauucauguuuuguggaacugcuaacaccagucuuaaacugcugauugcauacacaccaccagggguugguaaaccacaaaauagaacacaagccaugcugggaacacacaugauaugggauguaggauuacaaucaacaguuuccaugguggugccauggauuucagcuaguaauuacagauucacaacuccagaugcuuauucccaagcugguuuuauaacuugcugguaucagacaaauuuuguaguuccuccuaauacuccuaaaacugcuaacaucauaugcuuuguuucagguugcaaagauuucuguuugcgaauggcuagagacacuaauuugcacucacaaacuguuaacauugaacaaaauccuguagaaaaauauacagaagcaauacucaaugagguucuaguugugccaaauauacaaccuaguaauggacauaccucaaacucagcaccagccuuagaugcagcagaaacugggcauaccaaccaaguacaaccagaagauguuauggaaaccagauaugugaucacugaucaaacuagggaugaaaugagcauugagagcuucuugggcagaucugcaugcauagcuaccauacacacuaaauuaguacauggagaggaggguguuuauaauaugaaagguaacaaucucucaaaguggcagauuacacucaaagaaauggcucagaucaggaggaaaugugaacucuucacauaccugcgcuuugauucagagauaacaauuguagcuacacuagcagggcaaggagaugauuuaggacauauugcacuccaguacauguauguucccccaggugguccaauaccagagaccagggaugccgaugaauggcagucuggaacuaaugcaucagucuuuuggcagcacggccaaccauacccaagguuuacaauccccuucaugagcauugcaucagcauauuacauguucuaugauggguaugaaggugaugcccucaguucuaaauauggcucaguaguuacuaaugccaugggcaccuuauguguucgugugguuacagaacagcaaagcaacacagucaacauaacaaguaggauuuaucacaaagccaaacaugucagagcaugguguccuagaccccccagagcaguagccuaccaaucaacauauaccacaaauuuuguuccacaagacgggaucaauuccauuaaaaccaagaucaaaaucagaagagacauuaaagaggucagcaacuaugguccuucugacuugcauguacauauggguaaucuaguauacagaaauuuacaucuaugugaccaugaaaauuuaaaugacucaguucuaauacguuauucaagugauuuagucauauaccgaacaaacacggaaggugaugacuuuauuccgacaugcaacugcacgcaagccacauacuauuguaaacauaaaaacagauauuucccuauaaaugucaagaaacaugaaugguaugagauacaagaaucagaauauuacccuaaacauguccaguauaacauuuuaauuggugaaggaccuugugaaccaggugauugugguggaaaauuacucuguagucauggagucauagggauugucacugcugguggugagggccacguugccuucauugaccuaagagacuuucauguugcagaaacacagggaaucacagacuacauacauaaccuaggugaagcuuuuggugcuggauuuauugauaauauuaaagaccaaauuaauguuauuaauccuaucaacaaaaucacuaguaaaauaguuaaauggaucauuagaaucauaucagcuaugacaaucauuauuagaaauagugcagauccccauacaauuauugccacucuugcuuugauagguuguucaggaucuccauggagguuuauuaaagauaaagucuguaagugguuacaguugacuuauguacauaaagaaucagauggguggaucaagaaauuuacagagauguguaaugcugccagggguuuggaaugguuagguaauaaaauaucaaaauuuauugacugguuuaaauccaugcucccacaagccaaacuaaagguugaguacauaaagaaccuuaagcaguugccacuguuggaaaaacagauugauggcuuaagacuggccccccaaaagcaacagcaagaauauauagacacccugagaauaauguuagauucaucaaacaaauucuuaccucuguaugcaucagaaaauaaaagaaucaaagagcuccuuaaaagaagugacaugauauuacgcacaucaaagagaacagagccagucgguguacuuuuccacggugacccagggacuggaaaaucgauagcuacuucuaucuuagccagaaugauaaccacagaaucugacauauauucacuuccaccgucuccuaaauauuuugauggcuaugaucaacagaguguaguuaucauggaugauauaaugcaaaacccaaauggggaagauaugucucuguuuugccaaaugguuucuucaguaccguuuauuccaccuauggcagaucugcccgacaagggaaaaccuuucuccucugacuacgugcuagcaaguacaaaucacaguuuauuacacccaccaacuauaacaugcacaccagcuaugaauaggagauucuuuuuagaucuggauaucauaguuaaagaugauuauaaaauaaaucagggaaaguuaaacuuacagugugcucucaaaccauguaaaguaggaaaaguggguaacgcgaagugcugcccccucauauguggaaaggcuguucucuuuagagauaggaauacaggagagcauuugucacuggcaacuauauacaauaaaauuguagaggaaagcaaaaacagaaaagaguuaaauacaucacuacaggcaauauuccaaggcccaauagauguagugaauaaaccaccaccuccagcuauacuagauuuauuaaagucugucagaaauccugaagucauuagguauugugaagauaacagauggauuguaccuguugauuguagauuggagagagaucuuaacuaugccaauuuagugauaucuaugauugccaaugucauuaguauccuagguguuauuuauaucauauauaaauuguuuugcucuuuacaagguccauauucaggugaacccaaaccgauuacuagaaaaccagagagaagaguugucacccaagggccucaggaggaauuuggacguagucuacuuaaacauaaugcaugcauugucacaacugaaaauggcaaauucacaggguuagguauuuaugauaauguaaugaucauaccaacucaugcugaaguugguaagaguguagaaauagauggaauacaaguuaaagucucugauucauaugaucuauacaauucacaugguguaaaguuggaaauuacaguaguuaaauuaaauaggaaugaaaaauuuagagauauuaggaaauauauuccagauagugaggaugauuauucagauuguugucuggcucuuuuagcuaaccaaccagaaccuacaauuauagaagugggugauagcugcucauaugguaauauccugcucaguggaacucaaacagcaagaaugauuaaauacaacuacccaacaaaaucaggguuuuguggugguguguuauauaaaauagguuuaauacuggguauucauguagggggaaaugggaggaauggguucucugcuauguuguugaggucauauuuuaaugagcaacaagggaaaauagucucaacaucagauguuaaagacaaaaaccuauauaguauacacacuccaacaaacaccaaguuacaacccaguguguuccaugauaccuuuccuggaaagaaggaaccugcgguucugucaccaaaggaucccagauuacaaguuaacuuggaggaagcaaucuucucuaaguauaaagguaaugaaaagauugagauuacccaaaacaugaaaauugcagccgcccacuaugcagcacaacuaucaacucuugacaucaacucagaaccauuaacucuagaagaaaguguauauggcauagaaggucuugaagcuuuagacuuacacacuagugcaggauacccauauacagcaugugguauuaagaagaaagauuugauaccaaagaauagagauuugucaaaauuaaaaggugcaauugaaaaauacggucuggauuugccaaugauaacuuuuuuaaaagaugaacucagaaaaccugaaaagauaaacacagggaaaaccagaauuguugaagcuaguaguuuaaaugauacaguucaauuuagaauggcuuuuggcagacucuucucuguuuuucaccaaaauccugguauaaucacuggcucagcaguagggugugauccugaggucuuuuggucgaagauaccaguaaugcuugauggugaaugucuuauggcuuuugauuauucuaauuaugaugguagucuuaauccuguuugguuuaaauuacuugcuggcauucuuagugauuuagguuucccaggugauuuaguacaaaaauuaugcuacuccaaacacauuuuuaaaacuaaauauuaugaaguggaaggaggaaugccaucagguugugcaggaacuagcauauuuaauacuaugauuaauaaugugauuauuaggaccuuaguacuggacacuuauaaauauguuaacuuagauaaacugaaaauauuggcauauggugaugauauacuauuuuccuacccuuaugagauggacaugaaagaauuagcaagugagggaguuaaguaugguuugaccauuacuccugcugacaaaucagaagaauucaguaaacuggauuuuaccaaugccacuuuucuuaaaagaaacuucaaaccagaugauaaacacaguuuucucauacauccgguguauccugagacugaagucugggaauccauuagauggacaaagaacccccggaauaugcaggagcauguguuaucccuuugucaccuuauguggcauaauggugaggaaaaauacaaccacuucgugaccaagauuaggaguguuagcgcuggucgugcacucuauauaccaccauacgaacucuugcgccaugaaugguaugagaaauuuuaaacagauauagaauauauaaaugguuaguuuauagauuuuau

SEQ ID NO: 54 - RNA, 7216 nt, Human rhinovirus
uuaaaacagcggauggguucucccaccauccgacccacuggguguaguacucugguaugauguaccuuuguacgccuguuuauucccaaacccccacccguuauucgcccaaccccuguaacguuagaaguuuggaacuuaauuguacaauagggagcaccauauccaaugguguaacguacaagcacuucuguuuccccggagcgagguauaggugguacccacugccgaaagccuuuaaccgucauccgccaaucaacuacguaacagcuaguaacaucuuguuguugauuggacguucgaucaggugguucaccccccacuaguuuggucgaugaggcugggaaucccccacgggugaccgugucccagccugcguggcggccaacccagcuuaugcugggacgcccuuucaaugacauggugugaagacucgcaugugcuugauugugaguccgccggccccugaaugcggcuaacccuaacccuggagccuugcaccacaauccaguggugucugggucguaaugaguaauucugggaugggaccgacuacuuuggguguccguguuucucauuuuucuuuuaauugucuuauggucacagcauauaguauuauauacugugaucaugggcgcucagguuucaacacaaaagagugggucucaugagaaucaaaauauuuugacaaacgggucaaaucaaaccuucacagucauaaauuacuacaaagaugcugcaaguaguucaucagcuggucaaucucugucaauggauccaucuaaguuuacugaaccaguuaaagaucuuauguuaaagggugcaccagcacuaaauucaccaaauguugaagcgugcggauauagugacagggugcaacaaaucacucuuggcaacucuaccauaacaacacaagaagcugcaaaugcaguaguuuguuaugcugaguggcccgaguaucucccagauagagaugcaagugauguaaacaaaacuucaaaaccggacacgucuguuuguagguuuuacacauuagacagcaaaauguggcagaaaaacucaaagggaugguguuggaaacuaccagaugcuuuaaaagauauggguguuuuuggccaaaacauguuuuuccauucauuggguagaucaggguacacuauacauguacagugcaaugcaacaaaauuccacaguggguguuuacucguaguugugauaccagaacaucaauuagcgucacaugaagguggcaaugugucagucaaauacaaacuuacacacccaggugaagguggcaucgauuugucaacaaauauagaagcagauggaccuguuaaggacccaguuuauaauaugaaugguacacuacuggguaauuuacuaauauucccucaccaauucaucaacuuaaggaccaacaacacugccacacugguugugccauacauuaauucaguaccaauugauucaaugacaagacacaauaauguaucacuaaugauuauuccaauugccccacucauuguucccacuaacgcaucacccacucuaccugucacagugacaauagcuccaauguguaccgaauucacaggcauaagauccaaaacuguaguuccacaaggguuaccgacaacaacucuaccaggaucuggccaguuucuuaccacagaugauagacaaucacccagugcauuaccaaauuaugagccaacaccaaaaauacauauaccaggucaagucaaaaacuuacuagaaaucauccaaguagauacuuuaaucccaaugaacaauacccacaacaaggaugcagugaaaagcuaccuuauaccccugcaaccaaacagacagggagagaugguguuuggaaccaaacuuuucauaggagaugguguguuuaaaaccacucuucuuggugaaauaguucaauauuacacccacugggcaggaucauugagauuuucuuugauguauacagguccugcccuguccagugcaaaauuaauacugucuuacacucccccuggagccaacggaccaacaaccagaaaagaggcaaugcuuggaacacauguagugugggauauugggcuacaauccacaauaguuaugacaauuccuuggacuucaggggugcaauuuagguauacagauccagauacuuacacuagugcaggauuuuuaucauguugguaucaaacaucucugauacuucccccugacacacccacugagguguacaugcucuccuuuaucagugcaugcccagacuucaaacuuaggcucaugaaggacacccagacaauaucacagacuguagcacugacggaagguuugaaugacgaguuagaggaagucaucgucgagaaaacgaaacagacguuggcuucaauuucauccgggccaaaauacacucaaaguguucccacucuaacugcgaaugaaacaggugcuacgaugccaacuuuaccuucugacaauguugaaaccagaacaacauauaugcauuucaacgggucugagacagauauugagugcuuccugggucgugcugcuugugugcauguaacagaaauugaaaacaaaaacccgaauggaauaucaaaucacaaagcagagaaacuauuuaaugauuggaaaauuagccucucuagucuugugcaacucaggaaaaaguuagaacucuucacuuaugucagauuugauucagaauacaccauauuagcaacugcuucacagccugacacagcuaacuacucaagcaaccuagugguccaagccauguaugugccuccuggugcacccaacccaguagaaugggaugauuacacauggcagagugcaucuaauccuagugucuucuucaaggucggugacaccucuagauuuaguguaccauauguaggcuuagcaucagcauauaauugcuuuuaugaugguuacucacaugaugaugcagaaacucaauauggaauaucuguucugaaucauauggguagcauggcuuuuagaauaguuaaugaacaugauacacacagaacuuuaguuaaaauuagagucuaccaucgggcaaaacacauugaagcgugggucccacgugcucccagggcuuuaccauacacaucaauuggacguacuaauuaucccaaaaauccaaaaccaguaauuaagaaaagagaaggggacauaaaaaccuauggauuaggaccaagauuuggagggguguacacaucuaaugcgaaaauaaugaacuuucauuugaugacaccagaagaucauuugaacuuggugaccucauauccuaguagggaccuagcaauuguuucaacaggagcacauggugcagagaccauaccacacugcaacuguacaucaggugucuauuacucuaguuacuacagaaaauuuuacccaguaauaugugaaaaacccaccacaauauggauugaaggcggaccauauuaccccagcagauuucaaacaggagucaugaaaggugucgguccugcagaaccaggugauugugguggcauacucagguguguucauggaccaauuggacuguugacagcaggugguagugguuaugucuguuuugcugacauaagacaacuagagugcauugcagaggaacaggggauaagugauuacauuaccagccuagggagagccuuugguguuggguucacugaucaaauuucggccaaggugacagaauuacaggauguugcuaaggauuucuugacaacaaaaguuuuaucaaaaguagugaaaaugguaucagcauuagugauuaucuguagaaauuacgaggaucuugucacagucacugcuacuuuagcuuugcuggguugugauggcucccccuggagauuucuaaaaauguacauuuccaagcauuuucagguaccuuacauugaaagacaagcaaacgacggcugguuuagaaaauucaaugaugcauguaaugcagcaaaagguuuggaauggauugcaaacaagaucucaaaguuaauugaauggguuaaaaacaaagugcucccacaggccaaagagaaauuagaauucugcagcaagcuaaaacaacuggaccuauuagaaaggcagaucaauaccaugcauguuucaaaccccacacaagaaaagagagaacaauuguuuaacaaugucuuaugguuggaacaaaugucucaaaaguuugcaccacuuuaugccaccgaagcaaaaagaauuagagaguugaaaaacaaaauagugaauuacaugcaguuuagaaauaagcaaaggacugaaccaguauguguauugauucauggcaccccggguucagggaaaucacuaaccacuucaauaaucggaagagcaauagcagaacaauuuaauucagcagucuauucccuucccccagacccgaaacauuuugaugguuaccaacagcaagaaguugucaucauggaugaccuaaaccaaaauccagauggacaagacauaaguauguucugucaaaugguaucaucaguggacuuucuaccuccaauggcuaguuuagacaacaaaggaauguuauucaccagcaauuuuguuuuagcuucaacuaauuccaacacguugaguccuccaaccauuuuaaauccagaugcccuggcuagaagauuugguuuugaucucgacaucugucuacacaguacauacacaaagaaugguaaacucaaugccgcaauggcaaccagagugugcaaggauugccaucaaccaacaaauuuuaaaaagugcuguccacuuguuuguggaaaagcuacuaguuugguagauagagccacuaauguuagauacaguuuagaccaauugguuacagcuguuguuaaugacuacaagaauaaaaugcaaaucacugauucacuugaaacacuauuccagggcccugucuacaaagaccuagaaauagaugugaauaguacaccacccccugaaugcauaaaugauuuauugagaucuguggauucugaagagaucagagaguauugcaaaaagaaaaacuggacaauaccagaaauuccuaccaacauugagagggcuguuaaccaagcuagcaugauaaucaacacaauauuaauguuuguuaguacucuaggcaucauuuauguaauuuacaaauuguuugcccaaacucaaggcccauacucugguaauccagcacacuccaagcuuaaagccccgacccuacguccaguaauugugcaagggccuaacacagaguuugcauugucuuugcucaggaaaaacauaguaaccauuacuacagacaaaggagaguuuacuggucuugguauauaugaucauaucuguguuauucccacacacgcacaaccaaaugauagugugcuuaucaauggucaaaaaguucaaauuaaggacaaguucaaauuaguggacccagacaacaucaauuuggagcuaacuauauuagaccuuaacaggaaugagaaauuuagggauauuagagcauucauaucagaagacuuugaagggguagaagcaacauugguuguccacucaaacaacuacaccaauacaauacuugaaguuggcccaguaacaauggcgggucucaucaauuugagcaguacuccaaccaacagaaugauucguuaugaauaugcaacaaagacaggucaguguggagggguauuaugugccacugggaaaauuuuugggauucauguaggagguaauggaagacagggcuuuucugcacaacuuaaaagacaauacuuuguugagaaacaaggucaagugauagccaggcaaaaagucagggaacuaaacaugaacccuauuaacaccccaacaaaaucaaaacuacaccccaguguauuuuacaaugucuuuccaggagauaaagaaccagccguucuuagugauaaugauccuagauuggaaguaaaauuaacugaaucacuguuuucaaaauauaaggguaauguggaaauggaacccacagaaaacaugcuaguggcuguggaucacuaugcuggacagcuauuaucacuggauauucccacagaggaacuuacaaucaaggaagccuuguaugggguagauggguuagaaccuauugaugugacaacuagugcuggguacccuuaugucagcuuaggaauuaaaaagagagauauaauaaacaaagaaacaaaggauguagaaaagaugaaauacuacuuagauaaauaugguauagacuuaccauuaguuacuuacauaaaagaugaauugagaaguacugauaaaguacgauuagggaagagcagguuaauugaagcauccaguuuaaaugauucaguaaauaugagaaugaaauuaggaaacuuauauaaagcauuccaucagaauccugguacuauaacagguucagcaguaggaugugauccagauguguuuuggucuguuauuccuuguuuaauggauggucauuuaauggccuuugauuacucaaauuuugaugccucccuaucaccaguaugguuuguuuguuuagaaaagguauuguacaaauugggcuuuaaacacuccucauugauacaaucaauauguaauacacaccacaucuucagagaugaaauuuauguaguugaggguggcaugccaucaggauguucaggcacuaguauauuuaauuccaugauuaacaauauaauuauuagaaccuugguuuuagacgcuuacaagggaauagaucuggauaagcuuaagaucauagcauauggugaugaccuaauuguguccuauccuuaugagcugaacccugaagugcuggccaccuuggguaaaagcuaugguuuaacaauuacacccccagauaaaucagcagcuuuuucuaaaguaacaugggaaaaucucaccuuucuaaagagauauuucaggccagacaaacaauuuccuuuccuaguucacccagugaugccuaugaaggauauucaugaauccaucagauggaccaaggacccaaagaacacacaagaucaugucagauccuuaugcauguuagcauggcauucaggugaggaagaauacaaugaguucauuaggaaaaucagaacuacagacauuggcaaaugcuuaaucuuaccugaauacaguguucuuaggaaacgcugguuggaccucuuuuaaacaguucaaauauagacaucuaguuuaauuagaaauagaaguuuau

SEQ ID NO: 55 - RNA, 7128 nt, Human rhinovirus
uuaaaacuggauccagguuguucccaccuggaucuccuacaaggaguuguacucuauuauugcgguaauuuuguacgccaguuuuaucuccccuccccgauauguaacuuagaagcugaacacaaagaccaauaggugacauuuaauccaaaauguuaaaggucaagcacuucuguuuccccggccaaaguugauaugcuccaacagggcaaaaacagcugcggucguuauccgcaaaacaacuacgcaaagccuaguaccaccuucuagagcauguggcuggucgcuccacuauaaacccaauaguagaccuggcagaugaggcuaggagcuccucacugguaacaguguccuagccugcguggcugccugcgcacccugacaggugcgaagccaaauguuugacaaggugugaagagccccgugugcuuguuuugaguccuccggccccugaauguggcuaaccuuaacccugcagcuaguguguacaauccagugcauagcuagucguaaugagcaauugcgggaugggaccaacuacuuuggguguccguguuucuuauuuuuccuuauauuugcuuauggugacaauguauauauaacguauauauuggcaucaugggcgcucagguauccagacagaauguugguacacacuccacacaaaaugcuguuucaaauggaucaagucucaauuauuucaauauaaauuacuucaaagaugcugcuucuagcggcgcuucaaagcuugaauuuucacaagacccaagcaaauucacagauccaguuaaagauguauuggagaaaggcauucccacauuacaauccccaacugucgaggcauguggauauucagacaggauuauacaaauaaccagaggagauucuacaauaacaucacaagauguugcaaaugcuguaguugguuauggcguauggccucacuauuugacaucacaagaugcuacugcuauagauaaacccucccgcccagacaccuccucuaauagauucuauacucuagaaagcaaggaauggagugcaaauucuaaagguuggugguggaaguugccugaugcacuuaaagauaugggaauuuuuggagaaaacauguuuuaucauuuccucgguagaagugguuacacaguacauguccagugcaaugcaaguaaguuucaucaaggcacuuuaauuguugcuaugauaccagaacaucagcuggcuagugcaacaacaggaaaugcuacagcuggauacaaucucacacacccuggugaaggugguagggaugucagccugucaaaucgagcugaccuuaguaagcaaccuagugaugaugccuggcuuaauuuugaugguacuuuguuaggcaacauaacuguauauccacaucagcuaaucaauuuaaggacuaacaauucagccacaauuauugucccuuauguaaaugcagucccuauggauucaaugguuaggcauaacaauuggagucuaguuauaauaccaauauguccauuagaaucuuugccaaguucaacuguacccauuaccauuucaauaagcccuaugugugcugaauuuucuggugcucgugccacugcaaggaaccaaggcuuaccaguuuucauaacuccuggaucuggucaauucaugacaacagaugauuuccaaucuccuagugcccuacccugguuccaccccacuagggaaauuucaauuccuggucaagugaagaaucuuguugagcuuugccagauugacacuuugaucccaauaaacagugugacugguaauaccaacaauacuagcauauacacuguaacuuuaacuagagaaaccaguuuagcacaagaaauauuugcaauuaagguugauauugccucagauccucuugcaacuaccuugauuggugaaauagccaguuacuauacucauuggacagguaguauccgauucaguuuucucuuuuguggcucugcaaauacuacccuuaaauugcuuauagcauacacacccccugguauacgcaaaccaaagaacagaaaggaagcaauguugggcacucauguagugugggauguuggucugcaaucuacaauaucuaugguuguacccugggucagugcuagccauuuuagaaauacuacaccagacacauacucuuuggcugguuaugugaccuguugguaucagaccaaccuaguggugccacccaacacaccaacuacugccaaaaugcucugcuuuguuucaggaugcaaagauuucugcuugagaauggcacgugauacaaauuuacauuuacaaagugguccuauaacacaaaacccaguugaaaauuacguggaugagauauuaaaugagguucuuguaguaccaaacaucaaagagagucaggcuaccacaucaaaugcagcaccugcuuuggaugcagcugagacugggcacacaagcagcguucaaccagaggacaugguugagacuagguaugugcaaacaucacaaacucuugaugagaugaguauggagaguuucuuagggagaucugguuguauucauauuucaaagcuaguuguagaauaugagggauaugaugauacaaaaaacuuuaagacauggaaaauaaaccuacaagaaauggcacaaguuagaagaaaauuugagauguuuacauauacuagauuugauucagaaguuacucuaguuccuucuauagcugccaaaggggaugacauuggucauguagugaugcaauacauguaugucccaccaggcgcuccaguuccaaagaagagagaugacuacacauggcagucaggaaccaaugcaucuauuuucuggcaauauggacaaacauacccuagguuuucauuacccuuucuaaguauagcuucagcuuauuacauguuuuaugauggauaugauggagaccaaccuaguucuagguaugguaauauaguuaccaaugacaugggcacccuauguuccaggauaguaacugaugaucauaagcacaagauugaaguuacaacaagaauauaucacaaagcaaagcauguuaagguauggugcccgagaccaccuagagcuguagaguauacauacacccauguaacaaacuacaaaccacauucuggugaugugcaaacagcuauuagaccaagagcaacaauuaagacugcagggccaagugacauguacgugcaugucggaaaccuuauauauagaaaucuacaccucuuuaauucggauauccaugauuccauauuaguaucuuacucaucagauauagucauauaccgaacaaacacuacaggugaugacuacauaccaaccugugauuguacugaugcaacuuacuuuugcaagcacaaaaacagauacuauccaauaaaaguuacuagucaugauugguaugagauucaagagagugaguauuacccaaaacacauacaauacaaucuguuaauaggugagggcccaugugaaccuggugacuguggugguaaacugcuguguaaacauggagucauuggaauaauaacugcagguggugagggacauguagcauucauagauuuaagacauuuccauugugcugaagaacagggaauuacugacuacauacacaugcuaggugaagcauuuggcaguggauuuguugauaguguuaaggaccaaauaaaugccauaaacccaauuaacaacauaaguaggaaaauuguaaaauggauccuaagaauaauaucagcaaugguuguaaucauuagaaauucaucugacccucaaacaauaauagcuacauuaacacugauugguugcucuggaucaccauggagauuucucaaagaaaaguuuuguaaauggacacaacuaaacuacauucacaaggagucggauuccuggcuuaaaaaauucacugaaaugugcaaugcagcuagagguuuagaguggauugguaacaagauaucaaaauuuauugaguggaugaaaucaaugcuaccacaagcacaacucaaaaucaaauaccuuaaugaacuuaagaagcugaaccuuuuagaaaagcaaaucgaacaccugagaauagcugauuccagcacucaagagaaaauuaagugugagauagauacucuacaugauuugucauguaaauuucuucccuuauaugcuagugaagcuaagagaaucaaaguccuacauaacaagugcaauguaaucaucaaacagaaaaagagaugugaaccaguggcaguugucauacauggugaaccuggagcuggaaaaucuaugaccacaaauuuccuagcaagaaugauaacuaaugauagugauaucuauucacucccaccagauccaaaauauuuugaugguuaugaucagcaaaguguaguuauaauggaugacaucaugcagaauccaaguggugaggauaugacucuuuucugccaaaugguaucuagugucacguuuauccccccuauggcugaucuuccagacaaagguaaaccuuuugacucuagauuuguuuuguguaguacaaaccacaguauguuggcaccaccaaccaucacauccuuaccagcaaugaauagaagauucuaucuagauuuagacauuguaguuagugaaaaauauaaagaucagcaagggaagcuuaauguugcugcugcauuccaaccuugugaugucaauguuaaaauuggcaaugcacgcuguugcccauuuauaugugggaaggcaguaauguuuaaggacaggaacacuugccaauccuacacauuagcacaaguauacaaccacauacuuaaugaagauaagaggcguagacaaguuguagauguuaugucugcaaucuuccaagggccaaucucuuuggaaggaccgccuccagcugcaauaagugaccuauugcaaucaguuagaacuccagaaguuaucaaguauugugaauauaauaaauggauagucccugcugaguguagaauagaaagagauuuaaauauagccaacaccauaauuacaauuauagcaaauguaauuaguauuucuggaauuaucuaugugauauauaaacuguucugcacauuacaaggaccuuauuccggugaaccuaaacaaaagacaaagauuccagaaagaagaguuguugcacaagguccugaggaggaguuugggagaucacugauuaaacauaacucauguguagucaccacacaaaauggaaaauucacagguuuaggaaucuaugauagaacuaucauaauaccaacacaugcagauccagguaaggaaguucagauugauggcauuucuacaaaaguugaagauucuuaugauuuauauaauaaggaugguguuaagcuagaaaucacuguucucaaacuucaaagaaaugaaaaauuuagagacauuaggaaguacauaccugaaaaagaagaugauuauccugaguguaaccuggccuugucugcuaaucaacccgaaacuaccauaauuaguguuggggauguugugucauauggaaacauucuacuuagugguaaucaaacagcuaggaugcuuaaauauaauuacccaacaaaaucaggauacuguggugguauacuauacaaaauuggccaaguucuugguauucauguuggugguaaugggagagauggauuugcagcaaugcugcuaagauccuauuuuucugaaacacaggggcaaauuacuaucuccaaaccaacaguugagcuugguuuaccuaguauccacacaccaagcaagacaaaauuacaaccuaguguguuucaugauguuuucccuggaaguaaagaaccagcuguccuuucugacaaugaccccagauuggagguagauuucaaacaagcauuguucuccaaguauaaagguaacaaugaaugcacaaugaaugagcacaucaaaguugcuguuucucacuauucagcacaguugcacacauuagauauugauccuaagucuauaacuguagaagauagugucuuugguauagagggucuagaagcccuugaucuuaacacaagugcaggguaucccuauguaaccauggguauuaagaagaaagauuuaauagacaaccguaauaaagauuuaaccaaacucaaaauagcaauggacaaauauggaguugaucuacccaugguuacuuuccuuaaggaugaacuuagaaagaaggagaaaaucucugcugggaaaacccgugucauugaagcuagcaguguuaaugauacuguauuguucaggucagucuaugguaaccuuuucucaaaauuucaucuaaacccuggcaucaucacagguucugcagugggaugugacccggaaaccuuuuggucgaaaauacccguaaugcuagauggugaguguauaauggcuuuugauuacacaaacuaugaugguaguauacacccaauuugguuugaugcacuuaaguuaguuuuaucuaaccuuucauuuagaacugauuugauagacagauuauguaagucaaaacauauauucaaaggcacauauuaugagguagaggguggggucccaucagggugcucugguacaaguauauuuaauacaaugauuaauaaugugauuauuagaacauuagugcuagaugcuuacaaaaacauugauuuggauaaacucaagaucauugcuuauggggaugaugucauuuucucuuacaaauaccagcuugauauggaagcaauugccucggagggugucaaguacggauuaacaauaaccccugcagacaaauccaguguuuuuaagaggcuugauuauaguaauauaacuuuccugaagagagguuuuagacaagaugagaaacauaauuuccuuauucauccaacuuuuccaauugaugaaauucaugaaucgaucagauggacaaagaaaccaucucagaugcaggagcaugucuugucacugugucauuuaauguggcauaaugguagagauguguauacucaauuugaaaggaggauacgcagugucagcgcuggucgugcacuguauauaccuccuuaugacuugcuuuugcaugagugguaugaaaaauuuuaguuuaaauauagaaauauuaaacauuuaguuuuuuaguuuuau

SEQ ID NO: 56 - RNA, 7136 nt, Human rhinovirus
uuaaaacuggauccagguuguucccacuuggaucccccaagagggguaguacucuauuauuacgguaauuuuguacgccaguuuuaucucccuuacccccuuuguaacuuagaagauuuaaacacagaccaauaggcgacgaucauccagaucguuuaaggucaagcacuucuguuuccccggucaaugcugauaugcucuaccagggcaaaaacaguagagaucguuauccgcaaggugccuacacaaagcuuaguaacauuuugaagagcauuugguuggucgcucagcuauuaccccauaguagaccuggcagaugaggcuagaaguuccccacuggcgacaguguucuugccugcguggcugccugcgcacucucaugagugcgaagccauauguuugacaaggugugaagagccccgugugcucaccuugaguccuccggccccugaauguggcuaaccuuaacccugcagcuagugcaugaaauccaucauguaacuagucguaaugagcaauugcgggaugggaccaacuacuuuggguguccguguuucacuuuuuccuuuuauauuugcuuauggugacaauauauauagcauauauugacaccaugggcgcacaagucuccagacagaacguugguacucacucaacgcaaaauaugguuucaaauggaucaagccuuaauuauuuuaauaucaauuauuucaaggaugcagccucuagcggugcuucuaaguuagaguuuucacaagaucccagcaaauuuacagacccugucaaagauguuuuagaaaaaggaaucccaacacuucaaucuccaacuguagaggcauguggauauucagauaggauaauucaaauuacaagaggugauucaacaaucacaucacaagauguagccaaugcaguuguugguuaugguguauggccacauuacuuaagugcugcagaugccacugcuauugauaaacccacucaaccagacacgucaucaaauagguuuuacacucuggaaaguaagguuuggucaucaaccucacaaggauggugguggaaauugccagaugcucugaaagacauggguauauuuggggaaaauauguauuaucauuauuuggguaggaguggauauacuguacaugugcaauguaaugcuaguaaauuccaccagggcacuuugcuaguaguuaugauaccagaacaccaguuggcgagugcaagcagugguaauguuacagcagguuacaacuuuacacauccuggugagcagggaagggaagugggcaguacacgugaaagucacuugaaacauccaagugaugauaacugguuaaauuuugaugguaccuuguuagguaaugcccuuauauuuccucaucaguucaucaaucucagaaccaauaauucggcaacaauaauugugccauauguaaaugcaguaccaauggauucaaugcuuagacauaauaauuggagcuuagucauaauuccuauaaguccauugaagucagacacugcugcuacugccauaguaccaauaaccauaucuauuagccccauguuugcugaauuuucuggagcccgagcucaucccacggcucagggauuaccuguguauaucacaccuggaucuggacaguucaugaccaccgaugauuuacaaucaccaucugcucuaccgugguaucacccgaccaaagagaucaugauaccaggugaaguuaaaaacuuaauugagaugugccaaguggauacauugauuccuauuaauaacacacaggaaaauuuaaagaaaguuaauguauauacaauacaauuaaccaaucaacuaaagauggcagaagaaaucuuugcaauaaaaguagauauugccucacaacccuuaucaaacacuaugcuuggucagauugcaaguuauuuuacacauuggacuggcagcuugcgcuuuagcuuuauguuuuguggcacagcaaauacuacuuugaaguuacuuuuagcauauacaccaccagguauaaagaaaccugagacuaggaaacaagcaaugcuugguacucauauaguaugggauguuggauugcaaucgacuguauccuugguugucccauggguuagugcuagucauuuuagruacaccacaccagauacauacucugcagcuggauacauaacauguugguaucaaacaaauuuuguuuuuccacccaauacuccaaauacagcugauauguuguguuucgugucagcaugcaaagauuuuugucuacguauggcuagagacacugacaugcauauccaaaaugaugcuaucacacaaaauccaguugaggacuauaucgauaauguacuuaaugaagucuuaguaguaccaaauaccaaggagagucauccaagcacuucuaacucugcuccuauacuagaugcagcugaaacaggccauacuaguagugugcaaccagaagauacaguugagacccgcuauguacaaacuucccagacaagggaugagaugaguauugagagcuuucuggguaggucugguuguauucacauuucaacaauaaauguagaagaugguaaaacuuaugaugaaucuaaauuuagaaaauggcaaauuacacuacaagaaauggcucaaauuaggcgcaaauuugaaauguuuacauauguaagauuugauucagaaauuacauuggucccauguauugcuggaaaaggugaugacauaggacauguugucaugcaauacauguauguaccaccaggggcacccauaccagauagcaggacucauuuugcauggcagucagggacuaaugcaucaauauucuggcaacauggacaaccauucccaagauuuucacuaccuuuucugaguauugcuucagcuuacuacauguuuuaugauggcuaugauggggauaccuaugaaucacguuaugguacuacagugguuaaucacaugggcacacugugcauuagaauagucacuaaucagcaaaaucaugagguugaaaucaccacuagaguauaccacaaggcuaaacauauuaaagcuuggugucccagaccaccuagagcuguaccauacacagcaguagauucaacaaauuacaaaccuaugagaggggauguacaaaucuuuauuaaagagagagcaagcccaaaaguaguuacuuuuggaccaagugauauguuugugcauguugguaaucuuguguacagaaaucuucauuugugcaauucagaaaugcaugacucaguacuagucucauauucaucagauuuagucauauaccguacaaacaccauagguaaugacuacauuccuacaugugacugcacagaagcuacuuauuacugcaaacacaaagacagauauuauccaauuagagucacuagccaugauugguaugaaauccaagaaagugaguauuacccaaaacauauccaguacaaucuuuugauuggagaaggaccaugugaaccaggugauugugggggaaaauuacuuuguaagcacggggugauuggaauagucacugcugguggugagggucauguggcuuuuauugaucuuagacacuuucauugugcugaagaacaagguauaacugauuauauucacaugcuuggugaagccuuugguacagguuuuguugacaguguuaaagaucagauaaaugccauuaauccaauuaacaacauuaguaaaaagauaaucaaaugguuacucagaauaauaucugccaugguuauuauuauuagaaauucaucagauccacaaacaauaauagcgacuuuaacauuaauuggaugcucaggauccccuuggagauuucuuaaagaaaaauucuguaaguggacacaauuaaauuauguucauaaagaaucagauucauggcuuaaaaaauucacugaaauguguaaugcagcuagggguuuagaauggauugguaauaagauaucaaaguuuauugaguggaugaaaucuauguuaccucaggcacagcuuaaagugaaauaucugagugaacucaaaaaguuaaauuucuuagaaaagcaaauagaguaccuaagaguugcugauucaaggacucaggaaaagauuaaacaugagauugauacacuacaugauuuaucuuguaaauuucuaccacuuuaugcuagugaggcaaagagaauaaaaaucuugcacaacagauguaauacaaucauuaagcagaagaaaagaugugaaccgguggcaguugucauacauggugagccugguacuggaaaauccaugacaacaaauuucuuagcuagaaugauaacaaaugauagugacauuuauucccugccaccugauccuaaauauuuugauggcuacgaucaacaaaguguagucauaauggaugauauaaugcagaauccaaguggugaugacaugacuuuauuuugucagaugguaucaagugugacuuuuauaccaccaauggcugauuuaccagauaagggaaaaccauuugauucuagauuuguguuguguaguaccaaucaccaucuacuggcaccaccuacgauaacaucacuaccagcuaugaauagaagauuuuuccuugauuuagauauaguaguaugugauaaauauaaagauucucaaggcaaguuaaauguaucugcugcuuuucaacuaugugaugucaacacuaaaguagggaaugcccgcugcugcccauuuauuuguggaaaagcagugguuuucagagaucggaacacaugucaaacauauacucuaucccagguauacaauuugauccuugaagagaacagaaaacgcacacaaguuguugaugucauggcagcaauauuccaagguccaauuacucuugaaggaccuccaccagcagcaaucaaugauuuguuacawucugugagaacuccugaaguaauuaaguauugugaagauaauaaauggauuauaccakcagaauguaaaguagaaagagaucuuaauauggcuaacacaauaauaacaaucauugcuaauauuauuaguauuucugguauuauuuauguuauuuauaaacucuuuugcacacuacaaggaccuuauucaggugagcccaaacccaagaccaaagugccagagagaagagugguugcucaaggaccugaagaggaauuugguagaucacugauuaaacauaauucuuguguggugacuaccucaaauggcaaauucacggguuuaggaauuuaugacaggacuuuaauuuuaccaacacaugcagacccagguagggagauacaaguagauggaauuacaacugagguacaagauucuuaugauuuauacaauaaagaugguguuaaauuagagauaacaguucuuaagcuuaaaagaaaugaaaaauuuaaagacauuagaaaguauauuccagagaaugaagaugacuauccagauugcaacuuggcucuaucugcuaaucaaccagaaacuacuaucauuaauguuggagauguggucucauauggcaauauucuacuuaguggaaaucaaacagcaagaaugcuuaaauacaauuauccaacuaaaucaggcuauugugguggcaucuuauacaagauuggucaagucuuaggaauacauguuggugguaacgggagggauggcuuugcagcuaugcuauugagaucuuauuuuacagaggcacagggucaaauagucaccacaaaacccaccaccgaauguaauuuaccuaguauccauacaccaagcaagaccaaauuacaaccuaguaucuuuuaugauauuuucccugguaauaaagagccagcugugcuuucagaaaaugaucccagguuagaaguuaacuuuaaggaagcucuauucucuaaauauaagggaaacaacccgugugaaauraaugaccacauuaaaguggccguuucucacuauucggcacagcuaaugacauuagauauugauucaaacccaauuuccuuagagaguagugucuuuggcauagaagguuuagaagcacuugaucuuaauacuagugcaggguuuccuuauguaucuauggguauaaagaagagagaccugauuaacaaacaaacaaaagauauuacaaaacucaagguggcacuugauaaguaugguguugacuugcccaugguuacauuucuuaaagaugagcuuagaaagaaagaaaagaucucugcagggaagacacguguaauagaagcuaguaguauaaaugauacuguauuguuuagaucaacuuuuggaaaucuuuuuucaaaauuucauuuaaacccuggaauuauaacuggcucugcuguagggugugauccagaaacuuucuggucaaaaauaccagcuaugcuagaugaugaguguauaauggcauuugauuacacaaacuaugauggaagcauacacccagugugguuucaggcccuuaaagagauauuaucuaauuuaggguuugaaccaggucuaauagauagauuaugcaaaucaaaacauaucuuuaagaauacauacuaugaaguugaaggaggagugccaucaggcugcucugggacaaguauauucaacacaaugauuaacaauguuauuauuaggacauuaguuuuagaugcauauaagaacauugauuuggauaaacuuaagauaauagcauauggggaugauguaauuuuuuccuauaaauaucaauuagacauggaagcaauugcuaaagagggcgugaaguauggccuuacuauaaccccagcugacaaaucaagugaauuuaagcaauuagauuauaacaaugugacuuuucuaaagagaggguuuaggcaagaugacaaauacaaauucuuaauacauccaacuuuuccaguugaugaaauccaugaguccauacgauggacuaagaaaccaucucaaaugcaggagcaugucuuaucauugugucacuuaauguggcauaauggcaaggacguguacaaacaguuugagcaaaagauacgcagugugagcgcuggucgcgcacuguauauccccccuuaugaacuacuccugcaugaaugguaugaaaaauuuuaaguuguuuagauauagaaauauuaaacaauuaguuuuuuaguuuuau

SEQ ID NO: 57 - RNA, 7145 nt, Human rhinovirus
uuaaaacugaaucaugguuguucccaccaugauuaccuacggguguaguacacuuguaucccgguacauuugugcgccaguuuuauauccccuaccccaauuguaacuuagaaguuaagcaacacaagaucaauaggcggugguuauccaaaccaucaaugaucaaguacuucugucuccccgguaggugugaauaugcuuuaaccaaggcagaagcuaauccuaucguuauccgcaaggugccuacgggaagccuauuaacacuuugaaagaaauuuggcuggucgcucaguugcgcaaucccacgcaauagaccuggcagauggggcuagacaaaccccaccagcgaugguggucuagcccgcguggcugccugcacacccuuuuuugggugugaagccagaaauuggacagggugcgaagagccuacugugcucaccuugaguccuccggccccugaauguggcuaauccuaacccugcagcuguugcacaagauccauuguguauacagucguaaugagcaauugcgggauggaaccaacuacuuuggguguccguguuuccuuguuuucuuuuaucauugcuuauggugacaaguauauauagauauauuugucaucaugggcgcucaaguaucaaggcagaauguugguacucauucaacacagaacucagucucaaaugguucaagucuaaacuacuuuaacaucaauuauuuuaaagaugcagccucuucaggagcaucuagacuugauuuuucacaagacccaagcaaauucacugauccagucaaagauguacucaccaaaggaguaccaacacuucagucuccaucuguugaagcauguggauauucugauagaauaauacagauuacaagaggugauuccaccauaacaucucaagacauagccaaugcaguuguagcauauggaguauggcccagcuaucucacugcaaaagaugcaucugcaauugacaagccaacacaaccggacaccucauccaaucgguucuauacucuggagagcaaaaacuggcaaagugacucuaaaggauggugguggaagcuuccagaugcuuuaaaggacaugggcauuuuuggugaaaauauguuuuaucauuuccuaggaagaucaggguauacaguucauguccaguguaaugccagcaaauuucaucaaggaacauuguuaguuguugcuaucccagaacaucaacuugcuuauauagguacugguaaugucacaguuggguacaagcacacacauccuggagagucugguagaauaauagcaacuaauucaguuaauaauaacacaagacaacccagugaugauaacuggcuaaacuguaaugguacuuuaauggggaaucuacccauuuucccacaucaauuuaucaacuuaagaagcaacaauucagcaacacucauacugccauauaugaaugcaguaccaauggauuccauguuaaggcauaacaacuggagcauaguuauuaucccaguuuguucauuacaaagugaggcaggugccacugggcuuguaccaaucacaguguccauuagcccaauguuugcugaauuuucuggagcaagaaaugcagugguucaacaggguuuaccaguuaugcuuacaccaggaucagaacaauuucuaaccacagaugacaaucagucucccucagcacuaccaugguuucaucccucuaaggagauauucaucccagguagagugacuaauuuggcagaaauaugccaaguggauacuuugaucccgguuaauaauguacaagcuucuaaaaauaauguuaguauguauacugucaugcugucaacccaaacacaaacugcucaggaaauauuugccaucccaguugauguggccucucagccucuugcuacgacauugauuggugaaauagcuaguuacuacacucauuggacuggaagucuaagguucagcuucauguuuugcggcacagcaaacacgacauuaaaacuacuuauagcuuacaccccaccaggagucccaaaaccagauacuaggaagaaagcaaugcugggcacacaucuuguaugggauguugguuuacaaucaacagugucucuaguuguaccuuggguuagugcaagucacuucagauucaccaccccugacacguacucuaaagcuggguauauaacaugcugguaccaaacuaacuuuguaguacccccaggaaccccuaacacugcaaauaugcuguguuuuguuucugguugcaaggauuuuugcuugcgaauggcuagggauacagacuuacauguucaaacaacucccauaacacaaaauccaguggaagaauauguugaucagguuuuaaaugagguuuuaguuguuccaaacauaaaagaaaguaaaccccagucuagcaacuccgcuccaguuuuggacgcugcagaaacaggucauacgaaccaaguacagccugaagacaccauagaaacuagauauguuauaacugaccaaacaagagaugaaaugagcauugaaaguuuccucggaagaucagguugugcaacaauuaugagacuagaauuggaccacacugauuacaaugcugaagggaaaaauuuuacaacguggaaaaucaacuuacaggagauggcccagauuagaagaaagaaugagauguucacauaucucagauuugauucagaaaucacucuugugugugcaguggccucacaaggagacaauaauggacauguggugcuucaauuuauguuuguuccaccuggagccccuauaccaaagaagagagaugacuauacuuggcagucaggcaccaaugcaucuguguuuuggcaacaaggucaaacauaccccagguucucuauaccauuuucuaguauugccucagcuuauuacauguuuuaugauggauacccggaugacagcacauccucuccauauggcacuguaguuaccaaugacauggguacacuguguaugaggaugguuacagaucaacaacaacauaaggucacaauuacagcuagagucuaccacaaggccaaacauauuagugcauggggcccaagaccuccuagagcuguaccuuaucagcacauauauaacccuaauuauaaaacugaagaaggaacuccagacaccaaaguggcaauuagagcuaauauuaaaacuguuggacccucagaucuuuacgugcaugugggaaauuuaguauauagaaacuuacacuuaugcaccaaugagaaucuuagugacucaacacucauucgcuacucgucggauuuagucauauaccgcacaaacaccagaggugaugacuacauuccaacaugugauugcacacaaugcacuuauuauugcaagaguaaaggcagauacuacccaauaauaguuagaaagcaugauugguaugagauucaagaaucagaguauuacccgaaacauauucaguauaauauauuaauaggugagggaccaugugaaccaggagacugugguggaaaauuacuaugcaagcauggugucauuggcauugugacagcugguggagaaggacacguugccuucauagacauuagagauuuccaaugugcugaggaacagggaauaucagacuacaugcaguacuuaggugaagcuuuuggaacuggauuuguagauaguguaagagagcauguacaaagcauaaacccaauuaacaagauuaauuccaaaauggucaagugguuacucagaaucauuucagcaaugguuauaauuauuagaaauaaugcugauccccagacuauaauagcaacccucacucuucuuggauguaguggaucaccauggagguuucuaaaaaacaaauuuuguaauugguuugguuuaacuuauguacacaaagaaucagacucaugguugaagaaauuuacagagauguguaaugcugcacguggccuugaauggauaggaaauaagauuucaaaauucauugauuggauuaagucuaugcuaccucaagcaaaacuaaaagugacauauauacaaucccuuaaacaauugccacuacuggagaagaguguugauggacuaagacuugccaauccagaaaaacaauauuuauuuuuaaagcaaauugaagagaugaaagaccuauccaauaaauuucuaccacuuuaugcuaaugaggcaaaaagaauuaaagcccuugcucauaaagcauccaauauagucaagaaugcaaaaagaguugagccuguugcaguuauguuccaugggaauccaggaacagguaaaucuuuggcaacaaauuuucuuggcagaaugauuacuagugaaacagauauauauucauuaccaccagauccaaagcacuuugaugguuaugaucaacaaacggugguaauaauggaugaugucaugcagaauccugauggagaggacauguccuuauucugucaaaugguauccucaguaccauuuaucccacccauggcagaccuuccggauaagggcaaacccuucucauccagauauguuuuaugcuccacaaaccacaccauauuaacaccccccacaauaucaucuuuaccugcuaugaauagaagguucuuuuuagaccuggauauugaaguuagugagaauuauaaagauggaaaugguagaauucaguuagauugugcacucaagccauguaaugacaacauuaagauugggaaugcuaaaugcuguccauuuguaugugguaaagcaauaacauuuagagauagaaauaguugugagaaguauacucuagcccgaauuuaccacaagaucuuagaggaggauaaaagaagacaaugccuuucuaaugcuuuggaagcagucuuucaagguccaauaacacuaaauggaccaccaccaccagcuauacuagauuuacucaagucaguucguacgccagaggucaucaaguauugugaggauaacaaauggauugugccagcugagaauaccauugaacgagacuuaaauguggcaaacucaguaauaaccauaauugcuaaccuuaucaguauaguugguguuaucuauauuauauauaaacuauucugcucacuacaaggcccauauucaggagaacccaaaccuaaaacaaaaaccccagaacguagaguaguaacgcagggaccaguagaagaauuuggcagaagcuugauaaagcacaauacuuguguagugacaacagagaauggaaaguuuacaggauuaggugugcaugauaauguuaugauuauaccuacacauucagaaccagguagccaaauugaaauugauggaguuaagacaaaugugguggauaguuaugaucuguauaauaaagaugguguuaaacuagagauaacaguuguuaaauuaaauaggaaugagaaguucagggacauuagaaaguauuuaccugagcaugaagaugauuacauggagugcaaccuugcuuugguggcuaaucaggaacaaccaacuauuauagaaguuggagauguuugcucauauggcaacauucuccuaaguggaacccaaacagcuagaaugcuuaaguauaacuacccaaccaaaucuggauucuguggaggaguauuauacaagguuggucauaucauuggaauacauguaggagggaaugguagagauggauuuuccgcuaugauuuuaagaucuuacuucaaugaaaaccagggucucaucaagaauaagacugauguuaguguugcagguuuuaacccgguacauguuccaucuaaaacaaaguuacaacccaguauuuucuuugaugucuuuccuggugauaaagaaccagccguucuuaguaagcaugauccaagacuagagacugauuuccacacugcauuauuuucaaaauacucaggcaaccagcaaauugagaugucagauaacaucaaaguugcuguagcccauuauucagcacaguuauccacacuugauauaaacccagcaccacugucauuagaagaauguguguucgggauagauggacuugaagcccuggacuuacauaccagugcaggauacccuuacaccacuaugggaaucaaaaagaaagaucuaauaaacacuaaaacuaaagauguuacuaagcuuaaagaagugaugaauaaauauggaguagaucucccaaugauaacauuucuaaaagaugaacuuaggaagaaagacaaaauuguggcagggaagacuagaguuauagaggccagcaguaucaaugacacaguacaauuuagaaugacuuuugguaggcuuuuucaagcauuccauaacaauccaggcauagucacugguucugcaguuggaugugacccugacacuuuuuggucaaaaauuccacuuaugcuugauggagaaugucuuauggcuuuugauuacucuaauuaugauggaaguuugaacccagugugguuucaagcacuaaaggaaauauugcagaaucugggguuugagucaaagcuuauugauagauugugcaauuccaaacacaucuucuccucucaauauuaugagguggaagguggaaugccaucagguugugcaggaaccagcaucuucaauacuaugauuaauaauguaauuauaaggacuuuaguauuagauacauauagacauauuaaucuagacaaauuaaagauccuugcuuauggagaugaugugcuuuucuguuauccauacaaauuggauaugucugaauuagcuagugaaggaaggaaguauggucuuaaaaucacuccagcagauaaaucagaaaaauuuauagauuugaguuaugaaaaugccacguuccugaaaagaggauuccaaccagaccaaaaacauucauuucuuauacauccuacuuuuccaauuucugaaauacacaacucaaucagauggaccagaagcccccgaaacaugcaagagcauguuuugucuuuaugccaacucauguggcacaauggagaggaagcauacaaggaauuugugugcaagauacgcaguguuagugcuggucgcgcacuguauaucccuccauuugaagugcucagacaugagugguaugauaaauuuuaaauagauauagagauauuaauugccuguagauuaguauuuuuau

SEQ ID NO: 58 - RNA, 7224 nt, Human rhinovirus
uuaaaacagcggacggguaucccaccauccggcucacugagcguaguacucugguauuguguaccuuuguacgccuguuuuccccaaauccccuacccuuuauaucuccuaccccguaacguaagaaguuuucaaacaguacaauaggaagcaccacauccagugguguuauguacaagcacuucuguuuccccggagcgagguauagguggucaccaccgccaaaagccuuuaaccguuacccgccaaccaacuacguaauggcuaguaacaucauugauuuagauuggcguucgaucaggugguauccccccacuaguuuggucgaugaggcuaggaauaccccacgggugaccguguccuagccugcguggcggccaacccagcauacgcugggacgccaguuuacugacauggugcgaagacuugcaugugcuugguugagaguccuccggccccugaaugcggcuaaccuuaaccccggagccucgcagcauaauccaauguuguagaggucguaacgaguaauucugggaugggaccgacuacuuuggguguccguguuuccuguuuuucuuuaaaaugucuuauggucacagcauauauacuguauauacugugaucaugggagcucaagugucuacacaaaagaguggcucacacgaaaaccagaacauuuugaccaauggaucccaucagacuuuuacgguuaucaacuacuacaaagaugcagcuaguucaucgucugcaggacaaucuuuaucaauggauccuucaaaauuuacugaaccagucaaagauuuaauguugaaaggugccccagcuuuaaauucaccaaauguagaggcauguggauauagugauagggugcaacaaauuacacugggcaauuccacgauuacuacacaagaggcugcaaaugccguuguguguuaugcugaguggccagaguacuuaccagauagugaugcuagugaugucaauaaaacuuccaaaccagacacaucuguguguagauuuuucaccuuagacagcaaggaauggacacaaaauucgaaagguuggugcuggaaacugccugaugcacugaaggacauggguguuuuuggacagaauauguucuuccacucgcuagggagaacugguuacaccauccaugugcaaugcaaugcuaccaaauuucacagugguuguuuguuaguugugguaauaccagaacaucagcuagcuucccacgaugguggaacaguuucagugaaauaugaauucacacacccaggcgaucagggcauugacuugaguacagcugaggugcaauuuggaccugcuaaagacgcuauuuauagcauggauggaacuuuguugggcaauuugcuuauuuuuccccaucaguucaucaaccucagaacaaauaacacagccacaauaauagugccuuacaugaacucaguaccaauugauucaaugacacgccauaauaauauuucauuaaugguuauuccuauuucaccacuuauggcgcccacuggaaauucacagacuuuaccuaucacaguaacaauagcuccuaugugcacugaauuuacagggauaagauccaaaacuauugugccaaauguuagcccccaaggauugccagugaccacauuaccagggucuggacaauuccucaccacugaugauagacaaucacccagugcauugccaaacuaugaaccuacccccagaauacauaucccaggcaaagucaggaauuuguuagaaauaauacaaguugauacccugauuccuaugaauaauauuuauaauaaagauaaauucaacaguuaucuuauuccauugacagccaaccagcaaaacacccagauuuuugggacuaacuuauuuauuggggaugguguauucaaaacaacacucuugggugaaauaguucaguacuauacacauuggucaggaucccuuagauuuuccuuaauguauacagggccugccuuauccagugcaaaacucauauuggcuuauacccccccuggagcucaaggaccaacaucuaggaaggaagcaaugcuugguacucacguuguuugggauauugguuugcaauccacaauagucaugaccaucccauggacaucuggaguacaguucagauacacagacaaagauaccuacaccagugcaggauuucuaucguguugguaucaaacaucacuuauacuuccaccacagacugcugguaaggucuauuuauuaucuuucauaagugcaugcccugauuuuaaauuaagauuaaugaaagacacacaaacaauaucacagaccacagcacucacagaaggucuuaaugaugaauuagaagaggucauugucgagaaaacgagacagacauuggccucuguuucuucuggaccuaaacauacacagaguguaccuacauuaacugcuaaugaaacuggagccaccaugccaacucaaccuucugacaauguagagaccaggacuacuuauaugcauuuuaaugguucagaaacagauguagagagcuucuuagguagggcggcgugugugcacauggugaagauaguuaacaaaaacccaacagauauugugaaucaaaaagagcaucuuuuguucaaugacuggagaaucaaucuauccagcuuagugcaacucagaaagaaacuugaacuuuuuaccuauauuagauuugauucagaauauacaauucuagccacugcuucacaacccaaugauucacaauauuccaguaaucugacaguacaagcaauguauguaccuccaggagcacccaaucccacaaaaugggaugacuacacauggcagagugcuucaaaccccaguguguucuucaaaguuggagauacagccagauucaguguuccuuuugugggccuugcuucagcauauaauuguuucuaugauggauacucacaugaugaugaaaauacuccauaugggaucacaguacuuaaucauauggguaguauggcuuuuagagugguuaaugaucaugacacacauacuacagaaguaaagauuagaguuuaucauagagcaaaacauguugaagccuggaucccuagagcacccagagcauuaccuuauaugucaauuggucgaaccaauuaccaaagggaugcaaaaccaaucauugccaagagagaaaauaucaugaaguauggucuaggaccaagguuuggggguguuuucaccagcaauguuaaaauaaugaacuaccaccucaugacuccagaagaucauuugaauuuagugacauccuaccccaguagagauuuagccauaguguuuacaggugcacauggggcugagacuguaccacacugcaauugcaccucugguguguauuacuccacauauuacaggaaaucuuacccaaucauaugugacaaacccacaaccaucuggauagaagguggaccauauuacccaagcagguaccagguugguguaaugaaggguguaggaccagcagaaccaggcgauuguggaggcauuuuaagauguguacauggaccaauagguuuguuaacagcaggagguaguggauauguuuguuuugcugauauaagacaacuggaacaaauugcugaagaacaagguuuaggggauuacaucaccaguuugggaagagcauucggaguaggauucacagaucaaauaucagcaaaagucacagaauugcaagauguggccaaagauuuuuuaacaacaaaaguuuuguccaaaguggugaaaaugauaucugcacuugucaucauauguaggaaucaugaugacuuaguuaccgucacagcaaccuuagcucuauuggguugugacgguucaccauggagguucuugaagauguacaucucaaaacauuuccagguaccauauauugaaagacaagcaaaugauggaugguucagaaaauuuaaugaugcaugcaacgcagccaaagguuuggaauggauugcaaacaaaauuucaaagcucauagaauggauuaaaaauaaaguuuuaccucaagccaaggagaaauuggaauuuugcagcaaacuaaaacaauuagauaucuuagagaggcaaauaacaacuaugcauguuuccaacccuacacaagaaaaaagggagcagcuguuuaauaauguuaugugguuggaacagaugucucaaaaguuugcaccauuguaugcugcugaagcuaaaagaaucagagaacucaagaacaaaauacuaaacuacaugcaguuuagaagcaaacagaggacugagccuguguguguccugauccaugguacaccugguucagguaaaucucuaacaacauccauuguagggcgugcacuagcagaacauuuuaauucaucaguuuacucacuaccaccagacccuaaacauuuugaugguuaccaacaacaagagguugugauuauggaugacuuaaaccaaaauccagauggucaagauauuagcauguuuugucaaaugguuucuucuguugauuucuugccaccuauggcuagucuagauaauaaaggaaugcuuuuuacuagcaauuucguccuggcuuccacaaacucaaacacccuaaguccuccaacuauacuaaacccagaagcucugguuagaagauuugguuuugauuuagauauuugcuuacacaccacuuuuacuaaaaaugguaaauugaaugcagcaauggcaacuagcauauguaaagauugucaucaaccuucaaacuucaaaaagugcugcccguuagucugugggaaggcuguaagccuaguagauagagcaacuaacauuagguacaguguugaccaguuagucacagcuaucaucaaugauuacaaaaacaaaaugaaaaucacagacucacuugaagcacucuuccaggggccuguguauaaggacuuagagauagacaucugcaacacaccacccccagaguguauuaaugaucuacuuaaaucuguggacucagaggagauuagggaauauuguaaaaagaaaaauuggacuauaccacaaauccccaccaauauagauagagcaaugaaucaagccagcaugaucauuaauacaauucugauguuuguuagcacgcuagguauaguuuaugugauuuacaagcucuuugcccaaacccaaggaccuuauucagguaaucccucucauaauaaacuuaaaccaccaacucuaagaccuguuauaguucaaggucccaacacagaauuugcccuaucauuauugaggaagaauguagugaccauuacuacagaaaaaggggaauuuacagguuuggggguguaugaucaugucugugucauucccacucaugcacaaccuagugauaguguuuuaguuaauggccagaaaauacaaauuaaggauaaguauaagcuuguugauccagaaaauguuaacuuggaguuaacuauauuaguccuugauagaaacgaaaaauuuagggauauaagaggauuuauaucagaagauuuagaaggauuggaugccaccuuaguaauccauucaaauaacuuuacuaacaccauauuagauguagguccaauaaccauggcaggucuuauuaaucucaguagcacaccaacaaaucgcaugaucagauaugauuacccaaccagaacagggcaaugugguggagugcuaugcacaacuggaaaaaucuuuggcauacacgugggcggaaauggaagacaaggguuuuccgcacaacucagaaggcaauauuuugugagcaagcaaggucaaauaaccucuagacaaaagcuaaaagauuugaaucuaaauccaauaaacacuccaucaaagaccaaacugcaccccagcgucuucuaugacauauuuccuggcaacaaacaaccugcaguccucagugacaaugaucccagacuugagguaaaguuagcagacucucuguuuucaaaauauaaaggaaauguugaaaugaaacccacugacaauauguuaguugcaauugaucauuaugcugggcaacuuaugucauuagauauaccuacuaaugaauuaaccuuaaaggaagcuuuguaugguguugauggauuagaacccauagauguaacaacuagugcuggauacccauauguuaguuuagguauuaaaaagagggauauuuuaaauaaagagacucaagauacagaaaagaugaaauuuuauuuagauaaauaugggauagaucuaccuuuaguaaccuauaucaaagaugagcuuaggaguucagauaaaguuagauuagguaaaaguagauugauagaagcuucuagucuuaaugauucaguaaauaugagaaugaaauuaggacauuuguauaaggcuuuucaucaaaauccagguguaauaacaggaucugcuguaggaugugauccagauguguucuggucaguuauaccauguuuaauggauggacaucuaauggcauuugauuacucaaacuuugaugcuucuuuaucuccaguuugguuugaaugcuuagagaaaguuuuagaaaaauuaggauuuaagugugcuucacuaauucaaacaauaugcaauacucaccauaucuucaaagaugagauuuacacaguuaaaggaggaaugcccucagguuguucagggaccagcauuuucaauuccaugauuaauaauauaaucaucagaacacucauccuagaugcauauaaaggaauagauuuagauaaacuuaaggucauagcauauggugaugaccugauuguuuccuaucccuuugaacuggacccagagguuuuagcaacacuugggaaaaacuauggacuugugauuaccccaccagauaaaucagagaaguucacaaagaugacaugggaaaaucugacauuccugaaaagguauuuuagaccagaugaacaauucccauucuugauccacccagucaugccuaugcaggacauauaugaguccauucgauggacuaaggauccaaggaacacacaggaucaugucagaucuuuguguauguuagcauggcacucgggccaaaaggaguacaaugaauucauuggaaagauaagaacaacagacauuggaaaauguuugaauuuacccgaguauaguguccuuaggagacguugguuggacauguuuuaaauuuaaucagauauauauagacauuuaauuuguguagaauuagaaguuuau

SEQ ID NO: 59 - RNA, 7138 nt, Human rhinovirus
uuaaaacuraauccagguuguucccaccuggauuucccacgaggagcaguacucuacuauuccgguaguuuuguacaccaguuuuaucucccuuccccguguaacuuagaagacaagcacuucagaccaauaggaugguaacuaaccaaguuaucaaaggucaagcacuucuguuuccccggucaaaauugauaugcuccaccagggcaaaaacaguuuugaucguuauccgcaaagugccuacgcaaagcuuaguaacacuuugaagaaugugugguuggucguuccgcuauuccccauaguagaccuggcagaugaggcuagaaaauccccacuggugacaguguucuagccugcguggcugccugcgcaccucuuugaggugcgaagccauuccuuugacaaggugugaagagccccgugugcucacuuugaguccuccggccccugaauguggcuaaccuuaacccugcagcuagugcaugcaauccagcaugucucuagucguaaugaguaauugcgggaugggaccaacuacuuuggguguccguguuucucuuuuuacuuuuaaauugcuuauggugacaauauauauaguacauauauauugacaccaugggcgcacaaguuucuagacagaauguuggcacacacuccacacagaaugcaguuacaaauggcucuaguuugaacuacuucaauauaaauuauuuuaaggaugcagcaucaucuggagcaucaagauuggacuucucacaagacccuaguaaauucacugauccgguuaaagauguucuaacaaaggguauaccaacucuacaaucuccuucaguugaggcguguggguacucugacaggaucauccagauaacccgugguaacucaacaaucacaucacaggauauagcuaaugcuguuguagcauacggagucuggccugaauaucuaucuagugaugaugcuagugcuauagauaaaccaacccauccagacacuucaucuaaccgguucuacacacuagaaagcaaacaaugggacacgaauucuaagggauggugguggaaacuaccugaugcacuaaagagcauggguauauuuggagaaaauauguucuaucaccacuuagguagggcuggguacaccauacaugugcaguguaaugcuaguaaauuccaccagggcacuuugauaguaguggcuauaccagaacaucaauuagcuuauguaggaggaggaaauguuacugucggguacaaccauacacauccaggagaaacaggaagaaggauagguggauaugaaaacgucccacgcaauaggcagcccagugaugaaaauuggcuuaacugcaaugguaccuuguuagguaauuuaaccauuuucccacaccaguucauaaacuugaggagcaacaacucagcaacacuuauuuuaccauacguuaaugcaguacccauggauucuaugcuuagacacaauaacuggagcuuagugauuauuccuguuuguccacuggaaguugcaguugggucagaacaguauguaccaauaacuauaucuauuaguccaaugugcucggaauuuucaggugcacguaacaugguacagggauuaccaguuuuucuuaccccaggaucagcacaauuccuuacaacugaugauacucagucaccaucagcauuaccauacuuccacccuacuaaagaaauauucauaccaggugaggugaagaaucucucagaaauaugucagguggauucuaugauaccagugaacaauguccagggcaauaaaaacucugugaauauguauuccauuauuuuagauaaacaaacaacaucagcaggggaaguuuuugcaaucccaguugacauagcuucacaacccuuagcuacaacccuuauaggugagauugcaaguuacuacacacauuggacaggaagcauaagauucaguuucauguuuugugguucagccaacacuagucuuaaacuacuaauagcauacacaccuccagguguacccaaaccuaccaguaggagggaagccaugcuuggaacacaucuggugugggauguuggguugcaaucaacugcuuccaugguuguacccuggguaucugcaucucauuauagauuuacaacaccagacauguacucucuagcagguuauauaacaugcugguaucagacaaaccucauuguugcaccaaauacaccaucaacagcuaggaugauuuguuuugugucagguugcaaggauuucuguuuacgaauggcuagagacaccaaucugcauguucaaacuggaccaauaacccaaaauccagucgaaaaauacacagaagcaauccucaaugaaguucuuguuguaccaaacaucagugcuagcaauggacauacaucaaacucagcuccaacacuugaugcagcagaaacuggucacacuagccaggugcaaccagaagacaugauagaaacuagauauguuauuacugaucagacaaaggaugagaugagcauugaaaguuucuuaggaagaucugguuguguugcuaucauugaaaccaaauuaaaccaugaaacagacauguacaaugcugauggucagaauuuuucaaaguggaaaauaacauuaauggaaauggcacaaauuagaagaaagugugagcuuuucacuuaccucagauuugacucagaaauaacaauaguaacuaccuuagcaggacaaggggaggacauuggucauguaguuauucaauacauguacguaccaccaggggccccguugccaaacaaacgcaaugauuauacuuggcagucuggcacgaaugcuucagucuucuggcaacagggucagccauaccccagauucacuauuccauucaugaguauagccucagcuuauuacauguucuaugauggguaugagagugauaaaggcaacauuuauggaacagcaguuaccaaugauaugggaacccugugugcuagaauuguuacagaacaacagaaacauaaaguccuaaucaccagcagaauauaucacaaagcuaaacacaucaaagcaugguguccaagagcaccuagagcagucccauaccaacauaccuacagcccaaauuucaaaaacacugaugaaucuauaccagauacacaaauuaaaaucagagauaauaucaggcagguuagaacaguugggcccucagaucuuuauguucauacuggugaauuaauauauagaaaucuacacuuaugugaaccagaaaaucuagaugauucugucuuaauauguuacucaagugauuuagucaucuaccgcacaaauacuaaaggggaugauguaauuccugugugugauugcacacacgcuacauauuauuguaaacauaaaaauagauauuacccuauagaagugaagaaacaccaaugguaugaaauucaagaaucagaauacuauccaaaacauauacaauacaauaucuuaauuggaguuggaccaugugaaccaggugauugugguggcaaacuuuuauguaagcauggugucauagguauaguuacagcagguggugaugaccauguugcauucauagauuugagggauuuucauugugcagagaaccagggcauaucagauuacauacacucauuaggggaagccuuuggugcuggcuucauugauaacaucaaagaucaaauccagaccauuaacccuaugaacaagaucaccaguaaaauuguuaaaugguugauuagaauuaucucagcugucacaauuauuauuagaaauaaugcagacccacacaccaucaucgcaaccuuggcuuugauuggauguucaggcucccccuggagauucauuaaagaaaaagugugcaauugguugcaacuuaauuauguacauaaagaaucagauaauuggguaaagaaauuuacagaaauguguaaugcugcuagagguuuagagugguuaggcaauaaaauaucaaaguuuauugacuggguuaaaucaaugcuaccccaggccaagcucaaaguagaguuuauuaaaauguugaagcaguuacccuuacuugagaaagaaauagauggucuuagacuggccagccaaaaacaacaacaagaauauguagaaacccucaggauaauggcugauucaucuaggaaauuucuaccauuguaugcaucugaaaacaaacgcauaaaugaccuccucagaaggagugaaaugguaauguuaacagccaagagaacagaaccuguuggaguuuuauuucauggagaaccagguacuggcaaaucuauugcaaccucaauauuggguagaaugcuaacaaaugaaucagauauauacucacuaccuccaucacccaaguauuucgauggguaugaucagcagaguguugucauaauggaugauaucaugcagaauccuaguggugaggauaugucucucuuuugccagauggugucuucagucccuuucauaccuccuauggcagauuuaccagacaagggcaaaccuuuuucaucagauuuuguuuuagcuaguacaaaucauacccuucugcacccaccaacuauuacaugcacaacagccaugaacagaagauuuuuccuugauuuagauauaacaguuaaagaggaguacaagauacaacaagguaaauuaaauuuaagaugugcauuaaaaccaugcaaagaaggcaagguaggaaacgcuaaaugcugcccauuaauaugugggaaagcacuaguguuuagagacagaaacacaggugaacaccuaucauuagccacaaucuauaauagaauaguugaagaaaguaagaauaggaaggaauuaacuaauucucuacaggccauauuucaaggcccaauugauaugaacaggccaccccccccagcaauuguugaucuucuuaagucuguuagaaacccagauguuauuaaguacugugaagauaacaaauggguaguuccuacugaguguaaguuagagagagaccuuaauuaugcuaauuuaguuauuucuaugcuagcuaauguaauuaguauuguugguguuauauauauaauauauaaacuguucuguucacuacagggaccauauucaggugagccgaaaccuguaacaaagaaaccagaaagaagaguaguuacccagggaccacaagaagaauuuggucguagcauuauuaaacacaauacaugugugcucacuaccaauaauggaaaauucacaggccuugguauacaugauaauuucauggugauacccacccaugcugauguagggggagaaauugaaguugaugguaucaaaaccaaaguauuagacucauaugaccucuacaauaaacaggguguuaaauuagagaucacagucauaaaauuagauagaaaugaaaaauuuagagauauaagaaaguacauuccagagguggaagaugauuauguugacuguugucuugcacugacugcuaaccaaucagagccaacaauuuugcaaguuggugauucagucucauaugggaauauccuacuuagugguaaucaaacugcuagaaugaucaaauacaacuauccuacuaaaucaggguacuguggagggguuuuauacaaaauagguuugaucauagggauccauguugggggaaauggaaaagauggguuuucugcaauguuauuacgcucauauuucaacaaccaccaaggacagauuguaaauaagaccacuacaaaagagaaaggcauauacaguauacauacaccaacaaaaacaaaauuacaaccaaguguauuucaugauguuuuucccggcacaaaggaaccagcuguguuauccccuuaugacaacagauuaaauguggaucuggaagacucuauauuuucuaaauacaaagguaacacaagcuuagaagugacucauaacaugaagguugcugcaacccauuaugcagcucaauuaaugacucuagauauugauccaaaaccacuaacuuuagaagaaaguguguauggaauagaaggauuagaagcacuagacuugcauacaagugcuggauacccauacacagcaaaugguauaaagaaaaaagaucuuaucccaaaagauagagauuugacuaaacucaaacuggccauggaaaaauauggauuggaucugccaaugauaacuuuucuaaaagaugaguuaagaaaaccagaaaagauccgugagggcaagacgcguaucauugaagcuaguagucuaaaugauacuguucacuucagaguuacuuuuggcaauuuauuuucaaaguuucaucagaauccagguauagugacugguucagcaguugguugugauccugaaacuuuuuggucaaagauuccuguuauguuagauggugacugucuuauggcuuuugauuacucaaacuaugauggaagucuuaacccaguaugguuuaaauuacuugaggguguguuaaaugaacuuggauuucagggggaccuaguuagaaaacugugcuacucuaagcauguguauaaggcuuccuauuaugagguagagggugggaugccaucagguugugcugggacuaguauuuucaacacuaugauuaauaauaucauuauuagaacuuuggucuuagauacauacaaacauauaaauuuagacaaauuaaaaauuuuagcauauggagaugaugucuuauuuucauauccuuuugaauuagauaugaaagaacuagcuagugaaggggucaaguauggauuaacaauaacaccugcugauaaaacagaagaauucagaaaacuugauuuuggcaaugcuacauuuuuaaaaagaggguucaagguggaugacaaauauucauuucuugugcaucccuuauauccagaaaaagaggugugggaguccauuagauggacaaagaauccycgcaauaugcaagaacauguucuuucucugugucauuuaayguggcauaaugggaaggagccauauaaccauuuuguggcaaagaucaggaguguuagugcaggucgcgcacucuauauaccaccuuaugaaguucuuugucacgagugguaugacaaauuuuaagcaauauagaauagaugaaugaauaguucauagauuuuau

SEQ ID NO: 60 - RNA, 7116 nt, Human rhinovirus
uuaaaacuggaucuggguuguucccacccagaucaccuacaugguguuguacacuauuauuacgguaauuuuguacgccaguuuuauauccccuuccccaaauguaacuuagaagcaaugcaaacugaucaauagggggcaaucauccagauugcuaaugaucaagcacuucuguuuccccggucaagguugauaugcuccacaagggcaaaaacaaccgagaucguuauccacaagaugccuacgcaaagccuaguaaugcuuuugaagauacuugguuggucgcucagcugugcacccgacaguagaccuggcagaugaggcuagaaguaccccucuggcgacagaguucuagccugcguggcugccugcacacccuuuugggugugaagccaaguauuggacaaggugugaagagccccgugugcucaucuugaauccuccggccccugaauguggcuaaccuuaaaccugcagccagugcacacaaaccaguguguagcuggucguaaugagcaauugcgggaugggaccaacuacuuuggguguccguguuucacuuuuuaccuuuauauugcuuauggugacaauauauauagcacauauauauuguuaucaugggcgcucaagugucuagacagaauguugguacacacucaacacaaaacucagugucaaauggcucuagucucaauuauuucaacauaaauuacuuuaaagaugcugcaucuaguggugcuucaagacuggacuuuucucaggauccuagcaaauuuacugacccgguuaaggauguuuuggaaaaagguaucccuacuuugcaaucucccucuguugaagcuuguggguauucagauaggauaauucaaaucaccaggggcgacucaacuauaacuucacaagaugucgccaaugcaguaguugguuaugggguauggccgcauuaucuaaauucacgagaugcuguggccauagacaaaccaacucaaccagacacaucaucaaauagauuuuacaccuuggacaguaaaaugugggauaguaacuccaaaggauggugguggaaacuaccugaugcacuuaaggacaugggcaucuuuggugagaacauguuuuaucauuuccugggaagaaguggcuacacaguacaugugcaaugcaaugcuagcaaauuccaccaaggcacuuuauuggugacuaugauaccagaacaucaauuggccacaguuaauaaagcuaauguuacugcagguuacaaauacacacacccuggagagucugguagagugguuggcacacaagcagaugacacaaggcaacccagugaugacaauuggcugaauuuugauggcacacuuuuagguaauuuguuaaucuucccccaucaauuuauuaauuuaaggagcaacaauucagccacuauuauaguaccauaugucaaugcuguaccaauggauucuaugguuaggcacaacaacuggaguuuggugauaauaccaauuugucaacuucaaaguaacaauacauccaauauuguccccaucacuguuucuauuaguccaauguuugcugaguucucgggagcacgugcaaaaacagucgugcaaggccugccagucuacguuacaccaggcucaggucaguucaugacaacugaugacaugcaguccccuugugcauuacccugguaucacccaacaaaagagauuuuuauaccaggcgaaguuaagaaucuaauugaaaugugucaaguagauacacuaaucccaauaaacaguacaagagcuaacauagguaaugucaacauguauacaguuacucuccaaccucaaacugacauggcuacugaaguuuuugcaauuaagguggauaucgcaucacauccacuggccacaaccuuaauuggagagauugccaguuacuucacccacuggacaggaaguuugagauuuaguuucauguuuuguggaacagcaaacaccaccuugaaacucuugcuagcuuacacaccuccagggauuaguaaacccaaaaauaggaaagaggcaauguuaggaacacauguuguaugggaugugggcuugcagucaacaguaucuuuaguuguaccauggguuagugcuagucaauauagguucaccacaccagacacauacuccucagcugguuacaucacauguugguaucaaaccaauuuuguuguuccaccgaauacaccaaacacugcugagauguuguguuuuguaucugguugcaaggauuuuuguuuacguauggcaagagacacagacuuacacaagcagagugggccuauagaacaaaacccaguagagcgguauguagaugaaguucuaaaugaggucuuaguagucccuaauaucaaugaaagucacccuacaacauccaaugcagcuccuguucuagaugcagcugaaaccggacauacuagcaacauacaaccugaggauacuauugaaaccagauacguacaauccucacaaacauuggaugagaugaguguagagaguuucuuagguagggcaggcugcauucaugagucuauacuggauaucaaagaggauuauaacacucaaaguuuuacuaaguggaaaaucaacuuacaagagauggcacaaauuagaagaaaauuugaaauguuuacauacaccagguuugauucugagaucacauuggugccaaguauugcaaacaaagagggucacauuggucacauagucaugcaauauauguauguaccaccaggggcaccuauuccaacaaccagagaagauuaugcuuggcaaucugggacaaaugcaucuauauucuggcagcauggacaaccuuuuccucgcuuuucgcuccccuuucuaaguguugcaucagcauauuauauguuuuaugauggguaugauggagacacuuaccaauccagauacgggacugugguuaccaaugauauggggacacuguguucaaggauagugacaagugagcaaguacauaagguuaaaguaguaacaagaauauaccacaaagccaaacauaccaaagcuugguguccaagaccacccagagcuguacaauacacacacacccaugugacuaauuacaaacuagaaacagauguucacaccaguguagccauaagaccuagaacaaguuuaacaaauguuggucccagugacauguaugugcauguugguaaucuuauauauaggaauuuacaucuuuucaauucagacaugcaugacuccaucuuggucucuuacucaucagauuuagucauauaccgaacaaacacacaaggugaugauuauaucccuacauguaacuguacugaugcuacauacuauuguaaacacaaaaacagauauuauccaauuaaagucacaccacaugauugguaugaaauucaggagagugaguauuacccaaaacacauucaguacaaucuguugauaggugagggaccaugugagccaggugauuguggugggaaauugcuguguaaacauggugugauuggcauuaucacagcugguggugagggccauguggcauucauagaucucagacacuuucauugugccgaagagcaagggauaacugauuacauacacaugcuuggugaagcuuuuggaaguggauuuguagacaguguuaaagagcagaucaacucaauuaauccaauuaauagcauuaguagcaaaaugguuaaauggaugcuuaggauaauaucagcuauggucauaauaauuaggaauucuucagauccacaaacuauaauugccacucuuacacuaauuggaugcaauggcucaccauggagauuucuuaaagagaaauuuuguaaauggacccaguuaaccuauguacauaaagaaucagauucauggcucaaaaaauuuacugaaauguguaaugcagcuagggguuuggaauggauuggcaacaaaauuucuaaguuuauugauuggaugaaauccaugcuaccucaggcccaacuuaagguuaaguauuugaaugaacucaaaaaauugaaucuccuagaaaaacagauugaaaaucucagagcagcugacacaaacacucaagagaagauuaagugugagauugacacacuacaugauuuaucuuguaaauuucuacccuuguaugcuagugaagcaaaaaggauuaaaguguuguaccauaaauguacuaauauuauuaaacagaaaaagagaagugagccaguggcaguuaugauacaugggccuccuggaacaggcaagucuaucaccacuaguuuuuuagcuaggaugauuaccaaugagagugacauauacucacucccgccagacccaaaauacuuugauggguacgacaaccagagugugguaauaauggaugacaucaugcaaaauccugguggggaggacaugacauuguucugccaaaugguaucuaguguuacauucauacccccuauggcagauuugccagauaaaggaaaaccuuucgauuccagguuugugcuauguaguaccaaccacucucuccuagcuccuccaacuauaucaucacuaccagcaaugaauagaagauuuuacuuggauuuagauauuacugugcaugacaacuuuaaagauaaucaaggcaaauuggauguaucaagagcauuucaaccaugugacacuaauuugaaaauugggaaugcaaaaugcuguccauuugugugcgguaaagcagugauguucaaagaccgcaacacuuguaaaacuuacucacuuucacaaguauauagucaaauuuuagaggaagacaagagaagaaggcaaguaauagaugucaugucagcaauuuuccaagguccuauaucaauggacaaacccccaccaccggccauaacagaucuauuacggucagugaggacaccugaagugaucaaguacugucaagauaacaaauggauagugccugcagauugucaaauugagagagaucuuaguauagcuaauaguauaauuacaauaauagcuaauaucguaagcauugcugggauuauauauauaauuuauaaacuuuucuguacacugcaaggaccauauucaggagaaccuaaaccuaaaacaaaaguuccugaaagaagggugguugcucagggaccagaggaagaauuugguaugucaauaauaaagaauaacacuuguguggugaccacagcaaauggcaaauucacuggacuugguauauaugauaaaaucuuaauaauaccaacacaugcugauccagguagugaaauucaagugaaugguauacaaacaaaaauacuugauucauaugauuuguuuaacaaagaaggugucaaauuagaaauuacuguuuugaaauuagauagaaaugaaaaguuuagagauauacgcaaguauauuccagaaacagaagaugauuauccagaguguaauuuggcauugguagcaaaucaaccugaaccaaccauaauuaaagugggugauguuauaucuuaugguaacauauuacuuaguggaacacagacagcuaggaugcuuaaauacaacuauccaaccaaaucuggauacuguggugguguuuuauacaaaauuggucugguuuugggcauacacguggguggaaauggaagggauggguuuucaucuaugcuuuugagaucuuauuucacugagcaacagggccaaauuaaaaucuccaaacauguuaaggacguugggcuaccuuccauacacacaccaaguaaaaccaagcuccagccuaguguguuuuaugauaucuucccagguaguaaggaaccggcuguccugacagauaaagacccuagauuaaagguggauuuugaaacagcauuauuuucaaaauauaaggguaauguggaaugugaacugaaugaucauauacaaguugcuguagcccacuauucagcccaguuagcuacucuagacauagacccacaaccaguaacacuagaagauaguguauuuggaauggaugguuuggaggcucuagaccucaauacuagugcugguuauccauauguaucauugggaaucaagaaaagggaucuuaucaacaauaaaaccaaagauauuuccaagcuuaaaguagcauuagauaaauaugguguugauuuaccuaugauuaccuucuugaaagaugagcuuaggaaaaaagauaaaauaucugcaggcaaaacuaggguuauagaagcuaguaguauaaaugacaccauucuauuccgaacaacuuacggaaaccuauuuucuaaguuccacuuaaauccagggguuguuacaggaugugcaguggguugugauccagaaacuuuuugguccaaaauaccgcucauguuagauggagacuguaucauggccuuugauuauacaaauuaugauggaaguauacacccaguuugguucaaagcuuugagaaugguacuugacaauuuauccuuuaacucuacacucauugauaaacuuuguaauucuaagcacauuuuuaagucuacauauuaugaaguugaggguggugugccaucuggguguucaggcacuagcauauuuaauucuaugauuaauaauauaauuauuagaacucuaguucuggaugcauauaaacauauugaucuugauaaacuuaaaauaauugcuuauggugaugaugugauuuuuuccuauaaauauaaacuagauauggaagcaauugccaaugaaggacagaaauaugggcuuaccauuacaccugcagacaaaucuacugaauuuaaagaacuggauuacaaaaauguaacuuuucuuaagaggggauucaggcaggaugagagauacagcuuucuuauacauccuacuuuuccaguugaagaaauuuaugagucaauuagguggacaaagaagccaucacagaugcaggaacaugucuuaucauugugucacuuaauguggcauaauggcccugagaucuauagggauuuugaaacaaagauacgcagugucagcgcuggucgcgcacuguacaucccacccuaugaucuucugagacaugaaugguaugaaaaauuuuagauauagaacuaauaaauaauuaauuuguuuguuuuau

SEQ ID NO: 61 - RNA, 7116 nt, Human rhinovirus
uuaaaacuggaucuggguuguucccacccagaucaccuacaugguguuguacacuauuauuacgguaauuuuguacgccaguuuuauauccccuuccccaaauguaacuuagaagcaaugcaaacugaucaauagggggcaaucauccagauugcuaaugaucaagcacuucuguuuccccggucaagguugauaugcuccacaagggcaaaaacaaccgagaucguuauccgcaagaugccuacgcaaagccuaguaaugcuuuugaagauacuugguuggucgcucagcugugcacccgacaguagaccuggcagaugaggcuagaaguaccccucuggcgacagaguucuagccugcguggcugccugcacacccuuuugggugugaagccaaguauuggacaaggugugaagagccccgugugcucaucuugaauccuccggccccugaauguggcuaaccuuaaaccugcagccagugcacacaaaccaguguguagcuggucguaaugagcaauugcgggaugggaccaacuacuuuggguguccguguuucacuuuuuaccuuuauauugcuuauggugacaauauauauagcacauauauauuguuaucaugggcgcucaagugucuagacagaauguugguacacacucaacacaaaacucagugucaaauggcucuagucucaauuauuucaacauaaauuacuuuaaagaugcugcaucuaguggugcuucaagacuggacuuuucucaggauccuagcaaauucacugacccaguuaaggauguuuuggaaaaagguaucccuacuuugcaaucucccucuguugaagcuuguggguauucagauaggauaauucaaaucaccaggggcgacucaacuauaacuucacaagaugucgccaaugcaguaguugguuaugggguauggccgcauuaucuaaauucacgagaugcuguggccauagacaaaccaacucaaccagacacaucaucaaauagauuuuacaccuuggacaguaaaaugugggauaguaacuccaaaggauggugguggaaacuaccugaugcacuuaaggacaugggcaucuuuggugagaacauguuuuaucauuuccugggaagaaguggcuacacaguacaugugcaaugcaaugcuagcaaauuccaccaaggcacuuuauuggugacuaugauaccagaacaucaauuggccacaguuaauaaagcuaauguuacugcagguuacaaauacacacacccuggagagucugguagagugguuggcacacaagcagaugacacaaggcaacccagugaugacaauuggcugaauuuugauggcacacuuuuagguaauuuguuaaucuucccccaucaauuuauuaauuuaaggagcaacaauucagccacuauuauaguaccauaugucaaugcuguaccaauggauucuaugguuaggcacaacaacuggaguuuggugauaauaccaauuugucaacuucaaaguaacaauacauccaauauuguccccaucacuguuucuauuaguccaauguuugcugaguucucgggagcacgugcaaaaacagucgugcaaggccugccagucuacguuacaccaggcucaggucaguucaugacaacugaugacaugcaguccccuugugcauuacccugguaucacccaacaaaagagauuuuuauaccaggcgaaguuaagaaucuaauugaaaugugucaaguagauacacuaaucccaauaaacaguacaagagcuaacauagguaaugucaacauguauacaguuacucuccaaccucaaacugacauggcuacugaaguuuuugcaauuaagguggauaucgcaucacauccacuggccacaaccuuaauuggagagauugccaguuacuucacccacuggacgggaaguuugagauuuaguuucauguuuuguggaacagcaaacaccaccuugaaacucuugcuagcuuacacaccuccagggauuaguaaacccaaaaauaggaaagaggcaauguuaggaacacauguuguaugggaugugggcuugcagucaacaguaucuuuaguuguaccauggguuagugcuagucaauauagguucaccacaccagacacauacuccucagcugguuacaucacauguugguaucaaaccaauuuuguuguuccaccgaauacaccaaacacugcugagauguuguguuuugugucugguugcaaggauuuuuguuuacguauggcaagagacacagacuuacacaagcagagugggccuauagaacaaaauccaguagagcgguauguagaugaaguucuaaaugaggucuuaguagucccuaauaucaaugaaagucacccuacaacauccaaugcagcuccuguucuagaugcagcugaaacuggacauacuagcaacauacaaccugaggauacuauugaaaccagauacguacaauccucacaaacauuggaugagaugaguguagagaguuucuuagguagggcaggcugcauucaugaaucuauacuggauaucaaagaggauuauaacacucaaaguuuuacuaaguggaaaaucaacuuacaagagauggcacaaauuagaagaaaauuugaaauguuuacauacaccagguuugauucugagaucacauuggugccaaguauugcaaacaaagagggucacauuggucacauagucaugcaauauauguauguaccaccaggggcaccuauuccaacaaccagagaagauuaugcuuggcaaucugggacaaaugcaucuauauucuggcagcauggacaaccuuuuccucgcuuuucgcuccccuuucuaaguguugcaucagcauauuauauguuuuaugauggguaugauggagacacuuaccaauccagauacgggacugugguuaccaaugauauggggacacuguguucaaggauagugacaagugagcaaguacauaagguuaaaguaguaacaagaauauaccacaaagccaaacauaccaaagcuugguguccaagaccacccagagcuguucaauacacacacacccaugugacuaauuacaaacuagaaacagauguucacaccaguguagccauaagaccuagaacaaguuuaacaaauguuggucccagugacauguaugugcauguugguaaucuuauauauaggaauuuacaucuuuucaauucagacaugcaugacuccaucuuggucucuuacucaucagauuuagucauauaccgaacaaacacacaaggugaugauuauaucccuacauguaacuguacugaugcuacauacuauuguaaacacaaaaacagauauuauccaauuaaagucacaccacaugauugguaugaaauucaggagagugaguauuacccaaaacacauucaguauaaucuguugauaggugagggaccaugugagccaggugauuguggugggaaauugcuguguaaacauggugugauuggcauuaucacagcugguggugagggccauguggcauucauagaucucagacacuuucauugugccgaagagcaagggauaacugauuacauacacaugcuuggugaagcuuuuggaaguggauuuguagacaguguuaaagagcagaucaacucaauuaauccaauuaauagcauuagcagcaaaaugguuaaauggaugcuuaggauaauaucagcuauggucauaauaauuaggaauucuucagauccgcaaacuauaauugccacucuuacacuaauuggaugcaauggcucaccauggagauuucuuaaagagaaauuuuguaaauggacccaguuaaccuauguacauaaagaaucagauucauggcucaaaaaauuuacugaaauguguaaugcagcuagggguuuggaauggauuggcaacaaaauuucuaaauuuauugauuggaugaaauccaugcuaccucaggcccaacuuaagguuaaguauuugaaugaacucaaaaaauugaaucuccuagaaaaacagauugaaaaucucagagcagcugacacaaacacucaagagaagauuaagugugagauugacacacuacaugauuuaucuuguaaauuucuacccuuguaugcuagugaagcaaaaaggauuaaaguguuguaccauaaauguacuaauauuauuaaacagaaaaagagaagugagccaguggcaguuaugauacaugggccuccuggaacaggcaagucuaucaccacuaguuuuuuagcuaggaugauuaccaaugagagugacauauacucacucccgccagacccgaaauacuuugauggguacgacaaccagagugugguaauaauggaugacaucaugcaaaauccugguggggaggacaugacauuguucugccaaaugguaucuaguguuacauucauacccccuauggcagauuugccagauaaagguaaaccuuuugauuccagguuugugcuauguaguaccaaccacucucuccuagcuccuccaacuauaucaucacuaccagcaaugaauagaagauuuuacuuggauuuagauauuacugugcaugacaacuuuaaagauaaucaaggcaaauuggauguaucaagagcauuucaaccaugugacacuaauuugaaaauugggaaugcaaaaugcugcccauuugugugcgguaaagcagugauguucaaagaccgcaacacuuguaaaacuuacucacuuucacaaguauauagucaaauuuuagaggaagacaagagaagaaggcaaguaauagaugucaugucagcaauuuuccaagguccuauaucaauggacaaacccccaccaccggccauaacagaucuauuacggucagugaggacaccugaagugaucaaguacugucaagauaacaaauggauagugccugcagauugucaaauugagagagaucuuaguauagcuaacaguauaauuacaauaauagcuaauaucauaagcauugcugggauuauauauauaauuuauaaacuuuucuguacacugcagggaccauauucaggagaaccuaaaccuaaaacaaaaguuccugaaagaagggugguugcucagggaccagaggaagaauuugguaugucaauaauaaagaauaacacuuguguggugaccacagcaaauggcaaauucacuggacuugguauauaugauaaaaucuuaauaauaccaacacaugcugauccagguagugaaauucaagugaaugguauacaaacaaaaauacuugauucauaugauuuguuuaacaaagaaggugucaaauuagaaauuacuguuuugaaauuagauagaaaugaaaaguuuagagauauacgcaaguauauuccagaaacagaagaugauuauccagaguguaauuuggcauugguagcaaaucaaccugaaccaaccauaauuaaagugggugauguuguaucuuaugguaacauauuacuuaguggaacacagacagcuaggaugcuuaaauacaacuauccaaccaaaucuggauacuguggugguguuuuauacaaaauuggucugguuuugggcauacacguggguggaaauggaagggauggguuuucaucuaugcuuuugagaucuuauuucacugagcaacagggccaaauuaaaaucuccaaacauguuaaggacguugggcuaccuuccauacacacaccaaguaaaaccaagcuccagccuaguguguucuaugauaucuuuccagguaguaaggaaccggcuguccugacagauaaagacccuagauuaaagguggauuuugaaacagcauuauuuucaaaauauaaggguaauguggaaugugaacugaaugaucauauacaaguugcuguagcccacuauucagcccaguuagcuacucuagacauagacccacaaccaguaacacuagaagauaguguauuuggaauggaugguuuggaggcucuagaccucaauacuagugcugguuauccauauguaucauugggaaucaagaaaagggaucuuaucaacaauaaaaccaaagauauuuccaagcuuaaaguagcauuagauaaauaugguguugauuuaccuaugauuaccuucuugaaagaugagcuuaggaaaaaagauaaaauaucugcaggcaaaacuaggguuauagaagcuaguaguauaaaugacaccauucuauuccgaacaacuuacggaaaccuauucucuaaguuccacuuaaauccagggguuguuacaggaugugcaguggguugugauccagaaacuuuuugguccaaaauaccgcucaugcuagauggagacuguaucauggccuuugauuauacaaauuaugauggaaguauacacccaguuugguucaaagcuuugagaaugguacuugacaauuuauccuuuaacucuacacucauugauaaacuuuguaauucuaagcacauuuuuaagucuacauauuaugaaguugaggguggugugccaucuggguguucaggcacuagcauauuuaauucuaugauuaauaauauaauuauuagaacucuaguucuggaugcauauaaacauauugaucuugauaaacuuaaaauaauugcuuauggugaugaugugauuuuuuccuauaaauauaaacuagauauggaagcaauugccaaugaaggacagaaauaugggcuuaccauuacaccugcagacaaaucuacugaauuuaaagaacuggauuacaaaaauguaacuuuucuuaagaggggauucaggcaggaugagagauacagcuuucuuauacauccuacuuuuccaguugaagaaauuuaugagucaauuagguggacaaagaagccaucacagaugcaggaacaugucuuaucauugugucacuuaauguggcauaauggcccugagaucuauagggauuuugaaacaaagauacgcagugucagcgcuggucgugcacuguacaucccacccuaugaucuucugagacaugaaugguaugaaaaauuuuagauauagaacuaauaaauaauuaauuuguuuguuuuau

SEQ ID NO: 62 - RNA, 7116 nt, Human rhinovirus
uuaaaacuggaucurgguuguucccacccagaucaccuacaugguguuguacacuauuauuacgguaauuuuguacgccaguuuuauacccccuucccaaaauguaacuuagaagcaauacaaacugaucaauaggaagcaaucauccagauugcuaacgaucaagcacuucugucuccccggucaagguugauaugcuccaccagggcaaaaacagcuaagaucguuauccgcaagaugccuacgcaaagccuaguaaugcuuucgaagauacuugguuggucgcucagcugugcacccgacaguagaccuggcagaugaggcuagaaguaccccucuggugacagaguucuagccugcguggcugccugcacacccuauugggugugaagccaaauauuggacaaggugugaagagccccgugugcucaucuugaguccuccggccccugaauguggcuaaccuuaaaccugcagccagugcacacaaaccaguguguagcuggucguaacgagcaauugcaggaugggaccaacuacuuuggguguccguguuucacuuuuuacccuuauauugcuuauggugacaauauauauaguauauauauauuguuaucaugggcgcucaaguaucuagacagaauguugguacacacucaacacaaaacucaguaucaaauggcuccagucucaauuauuucaacauaaacuacuucaaggaugcugcaucuaguggugccucacgacuggauuuuucucaggacccuaguaaguuuacugacccgguuaaggauguuuuggaaaaagguauucccacucuacaaucucccucuguugaagccuguggguacucagauagaauaauccaaauuacuagaggugauucaaccauaacuucacaagauguugccaaugcagugguuggguauggaguguggccacauuaucugaauucacgagaugcuguggcuauagacaagccaacccagccagauacaucaucaaauagauuuuacaccuuagauaguaagaugugggauaacaacuccaaaggauggugguggaaacugccugaugcacucaaggacaugggcauuuuuggugaaaacauguuuuaucauuucuugggaagaagugguuacacagugcacgugcaguguaaugcuaguaaauuucaucaaggcacuuuacuggugaccaugauaccagaacaucaacuggcuacaguuaauaaagcuaaugucacugcagguuauaaauacacacauccaggugaaucaggcagaguaguugguacacaagcagaugacacaaagcaacccagugaugauaacugguuaaauuuugaugggacacuuuuaggcaaucuauugaucuuuccacaccaguuuauuaauuugaggagcaauaauucagccacaauuauaguaccauaugucaaugcuguaccaauggacucaaugguuagacauaauaauuggaguuugguaauaauuccaauuugucaacuccaaagcaacaauacaucuaacauugucccuaucacuguuucuauuaguccaauguuugcugaguucucuggagcacgugcaaaaacagucgugcaaggccugccaguuuauguuacaccaggcucgggucaguuuaugacaacugaugacaugcaguccccuugugcauuacccugguaucauccaacaaaagagauuuucauaccaggugagguuaaaaaucuaauugaaaugugccaaguggauacacuaauaccaauaaacagcacaagaacuaauauagguaauguuaacauguacacaguuacucuccaaccacagacugacauggcaacugagguuuuugcaaucaagguggacauugcaucacauccacuggccacaacuuuaauuggugagauugccaguuacuucacucauuggacaggaagucugagauuuagcuucauguuuuguggaacagcaaacaccacuuuaaaacucuuguuagcuuauacacccccagggauuaguaaacccaagaaucggaaggaagcaauguuaggcacacaugucguaugggaugugggcuugcagucaacaguaucuuugguuguaccauggguuagugcuagucaauauagauucaccacaccagacacauauuccycagcugguuauaucacauguugguaucaaaccaauuuuguuguuccaccaaacacaccaaacacugcugaaauguuauguuuugugucugggugcaaggacuuuugucuacgcauggcaagagauacagauuuacacaaacaaagugggccuauaacacaaaacccaguggagcgguauguggaugaagucuuaaaugagguauugguagucccuaauauuaaugaaagccacccuacaacaucuaauucagcuccuguuuuagaugcagcugaaacuggacacaccaguaauauacaaccugaggauacuauugagaccagauauguacaaucuucacagacacuggaugaaaugaguguagaaaguuuuuuaggcagaucagguugcauucaugaauccauauuggacauuaaagaggauuacaauacccagagcuuuacuaaauggaaaauuaacuuacaagagauggcacagauuaggagaaaguuugaaauguucacauacacuagauuuaacucugagauuacacugguaccaaguauugcaaacaaggaaggucauauuggucauauaguaaugcaauacauguauguaccaccaggagcacccauuccaacaacuagagaagacuaugcuuggcaaucuggaacaaaugcaucuauauucuggcaacaugggcaacccuuuccccgguuuucacucccuuuucuaaguguagcaucagcauauuacauguucuaugauggauaugauggugauacuuaucacuccagauacgggacuguagucacuraugauaugggaacauuaugcucacggauagugacaagugagcaagugcacaaggugaaaauaguaacaagaauauaucacaaagcuaagcacaccaaagcuugguguccaagaccacccagggcuguucaguacacacauacacauguaacuaauuauaaauuagaaacagauguccacacuaguguagccauaaaaccuagaacaagucuaacaaauguuggacccagugacauguaugugcauguugguaaucuuauauauagaaaccuacaucuuuuuaacucagacaugcacgacucuaucuugguuucauacucaucggauuuagucauauaccgaacaaacacacaaggugaugauuauauccccacauguaauuguacugaugcuacuuacuauuguaaacacaaaaacagguauuacccaauuaaagucacaccacaugauugguaugagauucaagagagugaauauuauccaaaacacauucaguauaacuuauugauaggugagggaccaugugagccaggugauuguggugggaaauuacuauguaagcauggugugauugguauuaucacagcugguggugagggccacguggcauucauugaucucagacauuuccauugcgccgaagaacaaggaauaacugauuacauacacaugcuuggugaagcuuuuggaaguggauuuguagauaguguuaaagaucagauuaauucaauuaauccaaucaacagcauuaguaguaaaaugguuaaauggaugcucaggaucauaucagcuaugguuauaauaauuagaaauuccucggauccacaaacuauaauugccacucucacacugauuggaugcaaugguucaccauggagguuccucaaagagaaguuuugcaaguggacucaauuaaccuauauacauaaggaaucagauucauggcuuaagaaauuuacugaaaugugcaaugcagcuagggguuuagaauggauuggcaauaaaauuucuaaauuuauugacuggaugaagucuaugcuaccucaggcccaacuuaaggucaaguacuugaaugagcucaagaaauugaaucuccuggaaaaacagauugaaaaucucagagcagcugaugcaaacucucaggagaagauuaaaugugaaauugauacacuacaugauuuaucuugcaaauuucuaccuuuauaugcuagugaagcaaaaagaauaaaaguguuauaucacaagugcaccaacauaaucaaacagaaaaagagaagugaaccaguggcagucaugauacauggucccccuggaacagguaagucuaucacuacuaguuuuuuagccagaaugaucacuaaugagagugacauauacucacuuccaccagauccaaaauacuuugauggauaugauaaccaaaguguggugauaauggaugacauuaugcaaaauccugguggugaggacaugacacuauucugucaaaugguguccaguguuacauuuauaccucccauggcagacuuaccagauaaaggaaaaccuuuugacucuagauuugucuuguguaguaccaaucacucucuccuggcucccccaacuauaucaucauuaccagcaaugaauagaagauuuuaucuggauuuggauaucacugugcaugacaacuuuaaagacaaucagggcaaguuggauguaucaagagcauuucaaccaugugacacuaacuuaaaaauuggaaaugcaaagugcugcccauuuguuugcgguaaagcaguaauguuuaaagaccgcaacacaugcagaacuuacucacucucacagguauauaaucaaauuuuagaagaggacaagagaagaagacaagugguugaugucaugucagcaauuuuccaagguccuauaucaauggacaaaccuccaccaccggccauaacagaucuuuuacggucagugagaacaccugaagugaucaaauauugccaagacaacaaguggauagugccugcagauugccaaauugaaagagaccuuaauauagccaauaauauaauuacaauuauagcuaacaucauaagcauugcuggaauuauauacauaaucuauaagcuuuucugcacauuacaaggaccauauucaggagagcccaaacccaagacaaagauuccugaaagaagaguaguugcucagggaccagaggaagaauuugguaugucaauaauaaagaacaacacuuguguugugacuacagcaaauggcaaguuuacugggcuugguauauaugauaaaauucuaauaauaccaacacaugcugauccagguagugaaauucaagugaauggcauacauacaaaaauacuugauucauaugauuuguauaauaaagagggugucaaauuggaaaucacuguuuugaaauuagauagaaaugagaaauuuagagauauacguaaguauauaccagaaacagaagaugauuacccagaauguaauuuggcauuaguggcaaaucaaccagaaccaaccauaauuaaaguaggugauguuauauccuaugguaauauauuacucaguggaacacagacagcuagaaugcuuaaguauaauuauccaacuaaaucuggguacuguggugguguuuuauauaaaauuggccugaucuuggguauacacguggguggaaauggaagggauggguuuucaucuaugcucuuaagauccuauuucacugagcaacagggucaaauuaaaaucucccaacacgucaaagauguuggauugcccuccauacauacaccaaguaaaaccaagcuucaaccuaguguauucuaugaugucuuuccagguagcaaagaaccagcuguuuugacagauaaggacccuagauuaaaaguggacuuugaaacagcacuguuuucaaaauauaaggguaaugugaaaugugaccugaaugaccacaugcaaguugcuguagcccauuauucagcccaguuagccacucuagacauagacccacaaccaauagcacuggaagauaguguguuuggaauggaugguuuggaagcuuuggaccucaacaccagugcugguuacccauauguagcauuagggauuaagaaaaaggaucuaauuaauaauaaaaccaaagacauuuccaaacuuaaaguagcauuagauaaauaugguguugauuuaccuaugauuacuuuuuuaaaagaugagcuuaggaaaaaagauaaaauaccuguaggcaaaacuaggguuauagaagcuaguagcauaaaugauacuguccucuuccgaacaacuuauggaaacuuauucucuaaauuucacuugaauccagggguuguuacagguugugcaguagguugugauccagaaaccuuuuggucuaaaauaccccugauguuagauggagauuguaucauggcuuuugacuauacaaauuaugauggaagcauacacccaguuugguucaaagcuuugagaauggugcuugauaaccuauccuucaacucugcacucauugauaaacuuuguaauucuaagcauauuuuuaaauccacauauuaugaaguugagggugguguacccucuggauguucugguacuaguauauuuaauucaaugauuaauaauauaauuauuagaacucuaguucuggaugcauauaaacauauugaucuugauaaacucaaaauaauugcuuauggugaugaugugauuuuuuccuacaaauacaagcuugauauggaggcaauugccagugaaggacagaaauaugggcuuaccauaacaccugcagauaaguccacuaaauucaaggaucuggauuacaaaaaugugacuuuucucaagagaggauuuagacaagaugaaagauauaguuuucuuauacauccuacauucccaguugaagaaauuuaugaaucaaucagauggacaaagaaaccaucacaaaugcaggagcaugucuuaucguugugucaucuaauguggcacaauggcccugagauuuauagggauuuugaaacaaagauacgcagugucagcgcuggucgugcacuguauauuccacccuaugaucuuuugagacaugaaugguaugaaaaauuuuagauauagaacugauaaauaauuaauucguuuguuuuau

SEQ ID NO: 63 - RNA, 7123 nt, Human rhinovirus
uuaaaacugggaguggguuguucccacccagaccacccacgugguguugugcucuguuauuccgguaaccuugcacgccaauuuuauaacccccuuuccccauguaacuuagaaguuuugcacauaggccaauagcaagcagcgaaccagcuguauaaggucaagcacuucuguuuccccggucaauguugauaugcuucaacaaggcaaaaacaacagcgaucguuauccgcaagaugccuacacaaagcuuaguaccuccuuugacgguauuugucuggucgcucagguguuuccccagcacuagaccuggcagaugaggcuagaaacuccccacuggugacaguguucuagccugcguggcugccugcacacccuucugggugugaagccaaauacuagacaaggugugaagagccccguguguucaucuugaguccuccggccccugaaugcggcuaaccuuaaacccgcagccauuacucacaauccagugagcggauggucguaaugagcaauugugggaugggaccgacuacuuuggguguccguguuucauguuuuucuuuauaauuugcuuauggugacaauauauagugauauauauuggcaucaugggcgcucaagugucuagacaaaauguugguacgcacucaacucaaaacaugguuucaaaugguucuaguuugaauuauuucaacauuaauuacuuuaaggaugcugcuuccagcggagcauccaaauuggaauuuucacaagauccuagcaaauucacagacccgguuaaagauguuuuagaaaagggaauuccaacuuugcaaucaccaacaguugaagcuuguggauauucagauagaaucauucagauuacaagaggagauuccacaauuacaucacaagauguagcaaaugcuguuguaggguauggaauauggccucauuacuuauccccagaagaugccacagccauagauaaaccaacacgcccugacacaucauccaauagauuuuacacuuuggagagcaagauuuggacaagugauucaaaagguuggugguggaaauugccugaugcacuuaaagauaugggaguuuuuggacaaaacauguauuaccauuuccuaggaagaagcggcuauacaauccaugugcaaugcaaugccagcaaauuccaccagggcacuuugauaguagcugccauaccagaacaucaauuggcaagcgcggaaagaggaaacguuaauacuggcuauaauuauacacacccuggugaaucugguagggauguugggaaagauagggaaaguacuagauaucaacccagugaugauaauuggcucaauuuugaugguacuuuauuggguaauauaaccauuuucccccaucaauucauaaauuuaagaaguaauaauucugcaacacugauucucccauauguaaaugcuguaccuauggacucuaugcuuagacauaauaacuggaguuuaguuauaaucccaauuuguccuuuagaaacuaauggaggugaugcuacugugccuauaacaauaucuauuaguccaauguuugcugaauucucuggagcacgagcccguagccaaggauugccagugcuaaugaccccggguucuggccaauucaugacaacugaugacuaucagucacccagugcauugccaugguuucguucaacaaaggaaauauuuaucccaggucaagugcauaauuuggcagaauugugucagguugauacaauuauaccaaucaauuacacaucagcaaauacaacuagugucaauauguauacuguaguguuggacaaaggugauccuggaagagaaguuuuugccaugagagcugacauagcaacucacccucuagccacaacauuaauuggagagauugccaguuauuacacacauuggacugguaguuugagauuuagccucauguuuugugguacagcuggcacuacacuuaaauugcuaguagccuacacacccccuggaauugcuaaaccaacaaacaggaaagaugcaaugcuugguacccauguuguuugggauguuggccugcagucaaccauaucaaugauugugcccuggguuagugcuagucauuuuagaaauaccacaccagacaaauucucacaagcaggauauauaacaugcugguaucagacugcucuugucacaccucccagcacaccugcuacagccagaaugcuuuguuuuguaucaggguguaaggauuucuguuuacgcauggcuagagacacuaauuuacauaaacaaauuggacccaucacacaaaauccaguugaaaaguauguugauaguguuuuaaacgagguauuaguuguuccuaacauuaaugaaagucauccuaguacuucaaauucagcuccugccuuggacgcugcagagacaggacauacaaguacuguucaaccugaggacaugauugaaacacgguauguucaaacaucacaaacuagagaugagaugagccuugagaguuuccuagggagaucuggcugcauacacauaucacaccuaaaugucagauacacugauuauaaugaagguaauaacuuuagaucauggcaaauaagcauaaaggaaauggcacaaauuagaaggaaguuugaacuuuucacauaugugagauuugauucagaaauuacuuuagugccuugcauagccucucaaaguaaugauauugggcauguagugaugcaauacauguaugucccaccaggugcuccuaaaccagaaaagagagacgacuacacuuggcaaucuggaacuaaugcuucaauuuucuggcaacauggacaaccuuacccucgcuucucacuuccuuucuugaguauagccucagcuuacuauauguucuaugauggcuaugauggugaugcucccggaucgcgauacgggaccauagugacaaaugacauggguacacuguguucuagaauuguaacugaagaacaccagacucaagucagcauuaccacaagaauauaucacaaagcaaaacaugugaaagcgugguguccacgacccccgagggcuguggguuauacacacacacauguuaccaacuacaagccaucacagggagauuacaguguuguuauuccaguuagagagagucccagacagauucuuaauguaggaccuagugacauguauguacaugucggcaacuugauauauagaaaucuacaucuuuuuaacucugaugcccaugacucuauuuuagucucuuauucaucugauuuagucaucuaccgaacaaacaccacaggugaugacuauaucccaacaugugauuguacagaugcaacuuacuacuguagacauaagaauagguacuacccaauaaaagucacuagccaugauugguaugagauacaagagagugaguauuaucccaaacacauccaauacaaucucuuaauuggugaagguccaugcgaaccgggagauuguggcgggaaacuucuuuguaaacauggugugauuggaauuauuacagcagguggugaggggcauguggcuuucauagauuugagacauuuccauugugcagaagagcaggguaucacagauuauauacauauguuaggggaagccuuugguaguggauuuguagauaguguuaaggaucaaauuaaugcuauaaaccccauaaacaauaucagcaagaagcuaguuaaguggauucuuagaauaauaucugcuaugguaauaauuauuaggaauaguucagacccacaaacaguuauagccacacuuacauugauaggcuguucaggaucgccauggcgauuucuuaaggaaaaguucuguaaauggacacaguugcacuauguacacaaggaaucagauucauggcuuaagaaguucacagaaaugugcaaugcagcaagaggucuugaguggauugguaacaaaauaucuaaauucauagaauggaugaaguccauguuaccucaggcccaauugaaggucaaguaucucaaugagcucaaaaaacugaguuuauuggagaaacaaauugagaacuugcgcugugcagacacaaaaacccaggagaaaauaaaaguagaaguugacacccuccaugauuuaucauguaaauuucucccuuuauaugcuagugaagcaaaaagaauuaagguuuuguauaauaaauguaauaauauaauuaagcagaaaaagagaagugaaccaguugcuguaaugauacaugguccaccugggacugguaaaucuauaacuacaagcuuucuugcuaggaugauaacaaaugaaagugacauuuacucacuaccaccagauccuaaauacuuugauggauacgaucagcagaguguaguuaucauggaugacauaaugcaaaauccggauggagaggauauguccuuauuuugucagaugguuucaagugucacauucauuccaccaauggcugacuuaccagauaagggcaagccauuugauucucgcuuuguuuucuguaguacaaaccaaucucuccuagcuccaccaacuaucacuucgcucucugcuaugaauagaagguuuuauuuagauuuagauauaauugugcaugagaauuacaaaaacacucagggaaaguuggaugugucuagaucuuuuaagccaugugauguagauaccaaaauagguaaugcaaaaugcuguccauucauaugugguaaggcugugucuuuuaaagaccggaacacaugugagguguauucucucugccggauuuauaacaugauuaugcaggaagacagacaccguaggaguguuguggauguaaugacagcaauauuccaagggccuaucacuauggaugcuccaccaccaccugcaauagcagauuuauugcaaucaguuagaaccccagagguaaucaaguacugugaggaaaacaaauggauaauuccagcagauuguaagauugagagggaucuaaacuuagcaaauaauaucauaacaauuauagcaaauguuauuaguauagcugguauuauuuuugucauuuacaagcuuuucuauacacuccagggcccauauuccggugagccuaaaccuaaaccuaagauuccagaaagaagaguuguagcucaaggaccugaagaggaauuuggccguucccugauuaaacauaacacuuguguuguuaccacagacaauggaaaauuuacaggcuuggguauauaugauaagaccaugauuauaccaacacaugccgauccagguaauacaauccaaauagaugggauaaauguuaaaauuucagauucuuacgaccuauacaauaaaaauggugugaaacuugaaauaacaguaauuaaauuagauaggaaugaaaaauuuagggacauucgaaaguacauaccagaaaaggaggaugauuauccagauuguaauuuggcuuuaguagcuaaucagccugaacccacaauauugaaugugggagauguugugucauaugggaauauauugcuuagugggaaucaaacugcaagaaugcucaaauacaauuacccaacuaaaucaggauauugugggggaguuuuauauaaaauagguaauauucuggguauacauguuggggguaaugguaaagauggauucucagccacauugcucagaucuuacuuuagugaaacucaaggacagauaacaaaaacugcaaaugugagagaauauggacuuccuaccauacacacuccuagcaaaaccaagcuacaaccuaguguauuccaugauguguucaaaggaaccaaagagccagcuguacuaucugagaaagauccacgcuuggagacagauuucaagaaagcccuauucucuaaauacaaagggaauuuagacugugaaaugaaugaucauguuaaaguugcaguugcacacuauucugcucaacuaaugacacucgauauagauucaagcaacaugagucuagaagauaguguguuugguucagaggggcuugaagcuuuagacuugaauacuagugcagguuuuccauacauaagcauggguauaaagaaaagggaccuaauugauaaaagcacuaaagauauaucuaaacuuaagguugcauuagauaaauauggaguggauuuacccauggucacuuucccuaaagaugagcuuagaaagaaagaaaagaucucuucuggaaaaacucgugucauagaggccaguagugugaaugauacaguagccuuuaggaugguauaugguaacuuauuugcagccuuucacaaaaauccuggaauaguaacagguucugcaguuggcugugauccagaaacuuucuggucaaagaucccugucauguuagauggugaaugcauaauggcuuuugauuauacaaauuaugaugguaguauacauccaaugugguuugaagcuuugaaaaugguauuaaauaauuugcaauuugaguccagacuaauagauaggcuguguaauuccaagcacauauacaaagacucauacuaugagguugaagguggaguaccuucaggauguucuggaacaaguauauucaacacuaugauuaacaaugugauuauaagaacauuaguauuagaugcauacaaacauauagauuuggauaaauuaaagauaauagcauauggugaugauguaauuuucucauauaaauacacucuugauauggaagcaauugcucaagagggcaguaaauauggacuaacuaucacaccugcugauaaaucugaaacuuucaaaaaacuugauuauagcaauguuaccuuucugaaaagaggcuuuaagcaagaugaaagauacucauuuuuaauucauccaaccuucccaauugaugagauacaugaaucaauuagauggacaaagaaacccucccaaaugcaggagcauguucucucauugugucacuuaauguggcauaaugguuacgaagucuacagagacuuugaacggaagauacgcagugucagcgcuggacgcgcacuguauaucccuccauacgaaaugcuccugcaugagugguaugaaaaauuuuaauagaauauagaaaugauaaauauuuaguuuauuaguuuuau

SEQ ID NO: 64 - RNA, 7230 nt, Human rhinovirus
uuaaaacagcggauggguaucccaccauccgacccacuggguguaguacucugguauuuuguaccuuuguacgccuguuucuucccuuuguacccgccccuuaaacuuccaccccacguaacguuagaaguuuauacaagcaguacaauagguugcaccauaaccagugguguuucguacaagcacuucuguuuccccggagcgggguauagacgguacccacugucaaaagcccuuaaccguuauccgccaaucaacuacguaauggcuaguaacaccaugaagguaaguugacguucgaucaggugguaacccccacuaguuuggucgaugaggcuaggaauuccccacggguaaccguguccuagccugcguggcggccaacccagcauuugcugggacgccaauuuacugacauggugugaagacuugcaugugcuugauugugacuccuccggccccugaaugcggcuaaccuuaaccccggagccuugcagcauaauccaauguuguggaggucguaaugagcaauucugggaugggaccgacuacuuuggguguccguguuuccuguuuucuuuaaguugucuuauggucacagcauauauacuauauauacugugaucaugggagcucaagugucuacacagaagaguggcucacacgaaaaucaaaacauucugacuaauggaucacaucagacauuuacaguaauuaauuauuacaaggaugcagcaagcucaucaucugcaggccaaucacuaucaauggauccaucaagauuuacugaaccaguuaaagaucugauguuaaaaggcgcuccagcauuaaauucaccaaauguugaagcaugugguuauagugacagaguccaacagaucacacuuggaaauucuacaauaacuacucaagaagcagcaaaugcuguaguauguuaugcugaauggccagaguauuuaccagauaaggaugcaagugauguaaauaaaacauccaaaccagauacaucugugugcagguuuuauacacuagauaguaaggacuggagugcaaacucaaaaggaugguguuggaaguuaccugaugcacucaaggauaugggaguuuuuggccagaauauguuuuuccacucacuagggagaacugguuauacaauucacgugcaauguaaugcuacaaaauuucacagugguuguuuguuaguuguuguuauuccagaacaucaauuagccucccaugaugggggaacuguaucuguaaaauacaaauucacacauccgggugaacagggcauugaucuagguacuaguggugaaagaacuggaccugcuaaggacgcaguuuauaauauggauggaacuuuaauuggaaacuuaacaauuuucccacaccaauucaucaaccucagaacaaauaauacagcaacuauaauaguaccuuacaucaauucaguaccaauugauucaaugacucgucauaacaauaucucacuuaugguuauucccauugucccacuaucagucccuaacggaaaccaacccacacucccuaucacagugacaauugcaccaauguguacagaguuuucagguauaagaucuaagacuauugucccaaaugcaucuccacagggacuaccuacuacaacacuaccaggaucgggacaauuucuaacuacugaugacaggcaaucacccagugcuuuaccaaacuaugaaccuacacccagaauccauauuccagggcaagucagaaauuuauuggaaauaauucaaguugacaccaugauacccaugaauaagaccaaggugaaugaugaagugggaaauuaccuuauaccacucauacagggucagaagaaugaacagaucuuuggaacaaauuuguauauaggggauggaguuuuuaaaacaacacuuuuaggugagauaguucaauauuacacccauuggucagguucacucagaauuucucuaauguauaccggcccugcacuaucuagugcuaagcuuauauuagccuacacaccaccuggagcacaagguccaaccacaaagaaagaugcarugcuagguacacauguuguaugggauauuggucugcaaucaaccauagugaugacaauaccauggacaucagguguucaauucagauacacggacaaagauacauacaccagugcugguuuucuaucuuguugguaucaaacaucacuuauccugccaccagaaaccucagguacaguguaccuauugucuuuuguaagugcauguccagauuucaaauugagauugaugaaagauacacaaacaauaucacaaacuucagcauuaacagagggccucaaugaugaauuagaggaaguuauugucgagaaaacgagacagacuuuagcuuccguugcaucaggaccaaaacacacccagagcgugccuauuuuaacagcaaaugaaacuggugccaccaugccaacucaaccaucagacaauguugagacuaggacuacuuauaugcauuuuaauggaucugaaacagacauagaaagcuuucuggguagagcugcauguguacauaugguugaaauaguuaauaaaaacccacuaaauauuaaaaaccagaagagagagaagcuauuuaaugaguggagaauaaaucugucuaguuuaguucaacuuagaaagaaauuggaauuauucacuuaugccagauuugauucagaauacaccauccuggccacugcuucacaaccaaccaacuccaguuacucuagugacuuaacugugcaagcaauguauguaccaccaggugcgccaaacccaacaaaaugggaugauuacacauggcagagugcuucaaauccuagugucuucuucaaaguuggugacacagcuagauucaguguucccuuuguuggucucgcaucagcauacaacuguuucuaugauggcuacucccaugaugaugaggauacuccuuaugggauaacgguacucaaucacauggguagcauggcuuuuagaguaguaaaugaacaugaugcacacacuacagaaguaaaaaucagagucuaucacagagccaaacauguucagguauggguaccuagggcaccuagagcacuaccuuauguaucaauaggacgcaccaacuaugaaaggcaaaacauaaaaccagucauugaaaagagaaccaguaucaaacaauauggauuggguccaagauuuggagggguguauacugguaauguaaagauaaugaauuaccaucuuaugacuccagaagaucaauugaauuuaguaucuucccauccaaacagagauuuggccguggugucaacaggugcucauggugcugaaacuauaccccacuguaguugcacauccgguguguauuauucaacauauuacagaaaguuuuauccggucaucugugaaagaucuacaacaauuuggauagaagguggucccuauuacccaagcagauaccaggcugguguaaugaaaggaguuggaccagcagaaccuggggauugugggggcauuuugagauguguccacggaccaauuggacuuuuaacagcagggggugguggauaugucugcuuugcagauauuagacagcuggaaugcauugcugaagaacagggcuuaggggauuacauuaccaguuuaggaagggcuuucggugugggguuuacagaccaaauaucagccaaggucacagaauuacaggauguggcaaaagauuuucuuacaacaaaaguauuaucuaaaguggugaaaaugauaucugcucuugucaucauauguagaaaucaugaugauuuggucacuguuacugcuaccuuagcucuuuuaggaugugaugguuccccauggagguuucucaaaauguacauuuccaaacauuuucagguaccauacauugagaggcaagcaaaugaugguugguucagaaaauucaaugacgcauguaaugcagcaaaggguuuggaauggauugccaauaagauuucaaaacucauagaauggauuaaaaauaaaguuuuaccacaggcuaaggaaaaauuggaauuuuguaguaaacuaaaacagcuugacauauuggagcgccaaauaaccacaaugcauguguccaaucccacacaggaaaagagagaacaauuauuuaacaauguuauguggcuggaacagaugucccagaaguuugccccucuuuaugcugcagaagcuaggagaauuaaggaucugaagaauaagauacucaauuacaugcaguuuaaaaacaaacaaagaacugaaccaguauguguucuaauacauggcaccccuggcucgggcaaaucccuaacaacaucaauagugggacgugcacuagccgagcacuucaauucagcaguuuacucacuucccccagauccaaagcauuuugaugguuaccaacaacaagagguugugaucauggaugauuugaaccaaaauccagauggucaggauauuaguauguuuugucaaauggucuccucuguagacuuucuacccccuauggccagcuuggauaacaagggaauguuguucaccaguaacuucguacuggcuucuacuaacucuaauacuuuaagucccccaaccauucugaaucccgaggcguuaguuaggagguuugguuuugauuuggauauuuguuuacacaguacuuacacaaagaauggaaaguuaaaugcugcaauggcaacaaguauaugcaaggauugucaccaaccaucaaauuuuaagaaauguuguccuuuaguuugugguaaggcaacuaguuuaguagauagagcaacuaauaucagauacaguguagaucagcuggucacagccauaauuagugauuacaaaaacaagguuaaaauuacagauucauuggaaauauuauuucaaggaccaguauauaaagauuuagagauagaugugugcaauacaccuccuccagaauguauuagugacuuacuuagaucaguugauucagaagaaguuagggaauauugcaagaagaaaaacuggauuaucccacaaauaccaacaaauauagagagagcagucaaucaggcuaguaugaucauaaacacaauacuaauguuuguuagcacacuaggaauaguuuauguuauauauaaacuguuugcacagacacagggacccuauuccgguaauccaucacauggcaaauugaaagcaccaacuuuaaggccuguuauagugcaggguccaaacacagaauuugcguuaucucugcucaggaaaaauauagucacuauuacaacagaaaaaggugaauucaccgguuugggaguguacgaucagauuuguguccugcccacacaugcucaaccuacagacaauguucucuugaauggacagaagguucaaaucaaagauaaauacaaacuaguugacccagagaaugucaauuuggagcucacuauaauaacucuugauagaaaugaaaaauuuagggacauuaggggguuuauaucagaggauuuagaaggauuugaugcuucauuaguuauucauuccaauaauuucacuaacaccauucuggacgugggaccaauaacuauggcagguuuaauuaacuugagcaguacaccaacaaaccgaaugauucgguaugacuauccaacaagaacaggacaaugugguggaguguugugcacaacggggaaaauauucggaauacauguuggaggcaacggaagacaaggcuuuucagcacaacucagaaaacaauacuuuguuucuaaacagggacagauuaccuccagacaaaaauuaaaagauuuaaacuugaauccaguaaauacuccuacaaaaacaaaguuacaccccaguguauuccaugauguuuuuccugguagcaaacaaccagcagucuugagugauaaugaucccagacuugagguuaaauugaccgaaucuuuguuuucaaaauacaaaggaaauguagaaaugaagccuacugaaaacauguuaauugcuguggaucauuaugcaggacaacucaugucauuagacauucccacuggagaacuaagucucaaagaggcacuauauggaguugauggucuugaaccuauugacauuacaacaagugcugguuauccuuauguuagucuagguauuaaaaagagagauauuuuaaacaaagaaacccaggagguagagaaaaugaaauuuuaucuugacaaguauggcauagauuuacccuuaguaacauauaucaaagaugaguuaaggagugcugacaaaguuagguugggcaaaaguagauugauagaagcaucuaguuugaaugauucagucaauaugagaaugaaauuggggcauuuauauaaaacuuuccaucagaacccuggcguuauaacugggucagcugugggcugugaccccgauguuuucuggucagugauaccaugcuuaauggauggacauuugauggcuuuugauuacucaaauuuugaugcuucuuuauccccagucugguuugaguguuuggaaagaguacuagagaaaauuggguuuaguugugcuucacugauucaaacaauaugcaacacucaucauaucuuuaaagaugaaaucuacacaguuaaaggggggaugccaucugguuguucugggacuaguaucuuuaauucuaugauuaauaacauaauuauuagaacacuuauuuuagaugcauacaagggaauagauuuagauaagcuuaaaauuauugcuuauggugaugauuuaauugcuucuuauccuuuugaacuggauccagagguguuagcuaaauuagggaaaaauuauggcuuaaccauuacaccaccugacaaaucugaaaaauuugucaaaaugacaugggaaaauuuaacauuucuaaaaagguacuuuagaccagaugaacaauucccauuucugauucacccagucaugcccaugcaagacauacacgaauccauucgcuggacgaaggauccacguaacacacaagaucauguuaggucauuguguauguuagcuuggcauucagggcaaaaagaauacaaugaauuuauaacuaaaaucagaacuacggaaauuggaaaguguuugaacuuaccugaauacaguguucuuagaagacgcugguuagauauguuuuaaaugauaaggaaacagauauagacauuuaauuugaguagaauuagaaguuuau

SEQ ID NO: 65 - RNA, 7201 nt, Human rhinovirus
uuaaaacagcggauggguaucccaccauccggcccacugggcguaguacacugguauucuguaccuuuguacgccuguuugccgccccucccccuuuuauuaccacauuuguggucgcugcaacguuagaagauuuuaaaguagugcaauaggaagcaucacaaccagugguguuaugcacaaacacuucuguuuccccggagcgagguauagacgguccccacugucaaaagccuuuaaccguuauccgccaaccaacuacgagacagcuaguaaugcccuguucuccugcaaggcguucgaucagacagauuuccccucuguuagucuggucgaugaggcuagaaguaccccacagguaacuguguucuagccugcguggcggccagcccagcuucugcugggacgccuuucaagagacauggugugaagacucaauugugcuugguugugaguccuccggccccugaaugcggcuaaccuuaaacccggauccaugcuaugcaaaccagcauaguuauggucguaaugggcaacucugggaugggaccgacuacuuuggguguccguguuuccauuuuuacuuuuugugucauuuaugguuacaauuaaguuguaaccaugggugcacaggugucuacacaaaagagugguucacaugagaaucaaaacuuuuugacuaauggauccaaccaaacauuuacagucauaaauuauuauaaagaugcagcuaguucuuccucugcuggccaaucacugucaauggauccgucuaaguuuacugaaccaguuaaagaccuuauguuaaaaggagccccagcacuaaacucccccaacauugaggcuuguggauacagugauaggguggaacaaauuacuauaggcaauucaaccauuaccacucaggaagcagccaaugccauuguuggguauggugaauggcccagcuuucuggaugauaaagaugccagugauguuaacaaaccuaccagaccugacaccucggcaugcagauuuuacacuuuggcuaguaaaacuuggucucaaucuucuaaaggaugguguuggaaacugccugaugcuuuaaaggauauggguauuuuuggacaaaacauguuuuaucacucacagggaagaaccggauauaccauccauguucaguguaaugcaacuaaguuucacagugguacuuugcugguggugguaauaccagaacaccaauuagcaucggcaaagggaggcaaugugucaguauacuaugauaaaacccacccaggugaaaaugggauagaccuaucuguagcagacgagcuuggaccuaaaacugacccaguuuauaacauggaugguacccucuuggguaaugccuuaaucuuuccucaucaauuuauuaaucugagaacaaacaauacugcuaccuuggugaugccauauauaaauucaguacccauggauuccaugacuaggcauaacaacuuaucacuucuaguaauuccagugauaccaaucacagcaacuaguggagcugcacacaguguuccaauuacugucacaauugccccaauguuucuugagcuuucggguaucagaucuauggcuguugucacacagggucucccaacaacuucaacuccugggucaaaucaguuuuugacuacagaugauaggcaaucaccaucagcauuaccaaauuaugaagucaccccacucauucauauuccugguagaguagugaaccuauuagaaauugcacagguugauucucuuauuccaauuaauaauauagcaaauaaugauaacuuggagagguaccgcaucccacuaacccccaauguacaagaaacacaagucuuuggcuucucauuauucuuggguggcaccguccugaaaacaacacucuugggugaaauagcucaguauuacacacacugggcagguucauugagagucucauucauguacacaggaccagcauuauccagugcaaaacucuuaauugcauacacucccccaggugccccagggccaaaaaccagaaaggacgccauguuggguacacauuuagucugggacauugguuuacaaucaacaguagucaugaacauaccauggacaucaggaucacaauuuagauacacugacccagauacauacacacauccagguuacauauccugcugguaucaaacaucucucauuuuaccuccagaaaccaaccaaacggucuauuuauuagguuuuauuagugcauguccagauuucaaauugagguuaaugaaagauacaucuucaauuucucaagagagagcauuaacugaagggcuugaggauguguuagaagaaguuauaguugauaaagcaaaacagacuauagcuucuauaaauaguaauuccaaacauacacagcaagucccaacccuaucagcaagugaaacaggugcaacccugcaaacaguaccuucugacaauguggaaacuagaaagaccuauaugcauuaugauggugcagaaacuaguguggagagcuuuuuggguaggucugcauguguacauguuacugaaauugaaaacaaaaguccugcaacagauaugaaccacaagaaucaaaaguuauuugaugauuggaagauuaauuuauccagcuuaguucaacucagaagaaaauuagaauuuuucacguaugucagauuugauucagaauacacaaucauagcaacuucuucacaaccuaaugaugcccaguauucaaacacacucacaauacaggcaauguuuaucccaccaggugcacccaauccaaaagagugggaugauuacacuuggcaaagugcuucaaauccaagcguguucuucaauguagguaauucagcaagauucaguguuccauacuuaggaauagcuucagcuuauaacaauuucuaugacggcuauucccaugacagcagaaccacaguuuauggaauaaauguguuaaaucacaugggagucauggccuucagaguugucaaugaaaaugaucaacaurcuacuaaaguuaaaauuagaauuuaucauagagccaaacauguaauggcuuggauucccagaccaccaagggccaaaccauaccuucauauagguagaacaaacuaugauggaucacagucaaucauucccaagagagauaccaucucaacauaugguuuaggacccagguuuggggguguauguacugguagugucaaagugaugaacuaccacuuaaugacacaagaagacagucucaaccuacaaacaccuuuaccagagagagacuuagcaauaaucaaccuaaaugggcaugguucagaaacaauuccacauuguaacugcacaucaggaguuuacuauucaagacauuacaacaaauucuauccaguaaucugugaaaaacccacaugcauauggauugaggguaauaacuacuacccuagcagguaccagcaaggaguaaugaaaggaguaggcccugcugaaccuggggauuguggaggcaucuugagauguguacacgguccaauaggacuccugacugcugguggggguggguuuguguguuuugcagauaucagaauguuagacaugcuccaugcacacuaccaggguaucccagacuacauaaccaaucugggcagagcauuuggcacaggcuuuacagaucacauuaaugauaaaauagcagaguugcaaagcacaaccaccaauuaucuaaauacaaaaguuuugucaaagguaguuaaaauuguaucagcucuaguuaucauuuguagaaaccaugaugauuuagucacaguaacagccacauuagcauuacuagggugugaugguucuccuuggagauucuuaaaaauguacaucaguaagcauuuucaccugccuuacauagagagacaaucaaaugauuugugguuuaaaaaguuuaaugacaugugcaaugcugccaagggacuggaauggauagcaaacaaaauuucaaaauuaauagacuggaucaaaaacaaauuacuaccccaggccaaggacaaacuagauuuuugcaaaaggcuaaaacagcuugauauaauagaaagacagguugaaacacugcacaugaaccacacaaaugaaaaugacagggaaguauuauuuaacaacauccuaugguuagaacaaaugucccagaaguuugcuccauuauacgcugcugaagcaaagagaauaaaaacacucaaaaacaaaaugacaaacuuuauccaguucagauccaaacauagaacugaaccuguguguguauuaauucacggcagcccuggcuccgggaaaucucuagccacuucauugauuggcagaucaauugcagacaaucauaagucaucuguauauucuuuaccaccagauccaaaacauuuugauggauaccagcaacaggcaguagugauauuagaugauuugaaucaaaacccaaauggagaagacaucagcacuuuuugucaaauggugucuwcaguagauuuuguaccaccaauggcaaauuuggacaacaaagggaugcuuuuuaccaguaguuuuguuuuggcuuccacuaacucucagacauuaaacccuccaacaguucuuaacccagaagcucuagcacgcagauuuggcuuugauuuagacaugugucuacacucuucauacacuaaaucaggcaaauuaaauguagcaauggcuugugaacuauguaaggauugccauacuccaacuaauuuuaaaaagugcugcccucugauuugugguaaagcucucagcuuaguugauaaacacacuaauguaagauauacuauugaccaacuggucacugcuauacuccaggagcacaacaacaaaacaaaaaucacaagcucccuugagguucuuuuccaagguccaguauacaaggauuuaaauauagauguacaugauaaacccccuccagaauguauuguagauuuauugaaaucuguggacugugaugaaguuagacaguauuguaaagaaaagaaaugguuaauaccagagauaccaaccaauguggaaagagcaguuaaucaagcaacuucacuuauaaauacaauauuaauguuuaucacaacaauggguauuaucuacaugauuuacaagauguuugcccagaugcaaggaccuuacucaggauuggagagcaagacuaaacucaaggcccccacacuacgugcaguugugacacaagggccuaacaccgaguucgccuugucacuccuaaggaaaaauauaauuacuguaacaacaucuaaaggagaguuuacuagucugggaauuuaugacagaauaugugugaucccaacucacucacaaccugaagaugagguguuagugaauggauucaaaacuagaguuagugacaaauggaaacuaguagauccagauaacaugaauuuggaaauuaccguucuccaguuggacagaaaugaaaaguucagggauauuaggucauuuauugcagaagauccugaauguagugaagcuacacuagugauuaauucaaauaauuuuaaagauacaaucauuacaguaggucaagcaaccuuaguugggaugauuaaucuaaguaauacacccaccacuagaaugauuagguaugauuauccaaccaaaacaggacaauguggcggaguuuuguguucaacaggcaaaauuuaugguauacauguagguggaaaugguagacagggcuuuuccgcucaauuaagaaaacaauacuuuguccagcaacaagggcagauaauaucaagaaagcauguugaugauuugaauaucaagccuauuaauacacccacaaagacaaaacuacuucccaguguauuuuacaauguuuuccccgggucuaaggaaccagcagucuugcauccagcagacaagagauuagaaguagacuuaaaugacucccucuuuucuaaauacaagggcaaugugaauaugaagaugacugagaacaugaaaguggcaguagaucauuaugcuggccaacuaaugucacuagagauaccaacagaagaauugucacuuaaagaagcacucuauggaacagauggucuugaaccaauugaucugaacacaagugcagguuacccuuaugugggcuuggguauaaagaagagguccauucuaaauaaggaaacacaagacacaacaaaaaugcaagaguguuuaaguaaauauggaauagauuugcccuuaauaacauauauuaaagaugaguuaagaggcaaagucaagauuagguuagguaaaaguagauuaauagaagcaucaagccugaaugacucaguuaauaugagagucaaauuaggucacuuauacaaagcauuccacaaaaacccaggaacauuaacagggucggcaguagggugugauccagauguuuucuggucagugauaccuugcuuguuagauggggaguugcuagcauuugauuauucaaacuuugaugccagcuuaucuccuaucugguuugauugucuagaacuaguacugagaaaaauugguuuugaaucagcaaauuuaauaaaacaaauauguaccacucaccacauauuuagagaucaaguuuaugugguggaggguggaaugccaucugguuguucuggaacuagcauauucaauucaaugauuaauaacauaauuauuagaaccuugauauuagauguuuauaaaggaauagauuuggacaaauuaaaaauaauugcuuauggugaugauguaauuauuucuuauccuuaugaguuagacccagagagaauagcagagcaaggaaaaaccuauggauuaacaauuacuccuccagacaaaacagaacauuuugguaaaacagauuggaguaauguuacuuucuuaaaaagaaauuuuagaccagauccagaauuuccauuccucauucauccagucaugccaauggcugauauucaugagucuaucagauggacuaaagauccaaagaacacucaggaucaugucaggucauuguguauguuagcuuggcauucaggagaagaagaauaugagaaauuugucaaggguauacguaguaccaguguagguaaagcucuuguuaucccaucauacucaguucucagacguagguggcuggauuuguuuugaaugauuuauauauagagaauauauuugauuagaauuuguacucuau

SEQ ID NO: 66 - RNA, 7140 nt, Human rhinovirus
uuaaaacuggauccagguuguucccaccuggauuuccuacauggaguuguacucuguuauuccgguaaccuuguacgccaguuuuauaucccuucccccuugcaacuuagaaguuaagcacgcagaccaauagguggugauuauccaaaucacuaacggucaagcacuucuguuuccccgguuuaaacugauacgcuccaacagggcgaaaacagugcaaaucguuauccgcaaggugccuacacaaagcuuaguagcgcuuuggagaaugugugguuggucgcucagcuauacccccuaguagaccuggcagaugaggcuagaagcaccccacuggcgacaguguucuagccugcguggcugccugcacacccuuaugggugugaagccauacauuugacaaggugugaagagccccgugugcucacuuugaguccuccggccccugaauguggcuaaccuuaacccugcagcuggugcauguaauccaacauguugcuagucguaaugagcaauugcgggaugggaccaacuacuuuggguguccguguuucacuuuuuaccuuuuaauuugcuuauggugacaauauauauacaacauauauauuggcaucaugggcgcucagguaucuagacagaauguuggaacgcacucaacucaaaacucagucucuaauggauccagucuaaauuauuucaacauaaauuauuuuaaagaugccgcgucaaguggagcaucaaaacuugaauuuucacaagauccaaguaaauuuacugauccaguaaaagaugucuuagagaaaggaauaccaacuuugcaaucuccaacaguagaggcuugugguuauucagauagaauuauacagauuacuagaggagacucuacaauaacaucucaagauguagcaaaugcagugguuggauauggaguguggccucacuaccuaacaccgcaagacgccacagcuauagacaaacccagccaaccugacacaucaucaaauagauuuuauaccuuagagaguaaagaauggaccaauuccucucaaggguggugguggaaacuaccugaugcauugaaggacaugggaauauuuggugaaaauauguauuaucauuuucuugguagaucaggguauacagugcaugugcaauguaaugcaagcagauuucaccagggaacauuauuaguugugaugaucccugaacaccaauuagcuagugcaaccaagggcaauguaacagcagguuauaauuauacacauccaggagaacuagguagaauuguuggacaaacaagggcugaaauaaacaacaagcaaccuagugaugacaauugguuaaauuuugaugggacuuuucuuggcaauguuuuaauauuuccccaccaauuuauuaaccugagaagcaauaacucagcaacaaucauuguaccauauguuaaugcaguaccaauggacucaaugcuuagacauaauaauuggaguuugguaauuauuccaauuaguccccuuaaaagugauaccacugccacaucaaaagucccuaucacuauaucaauaagucccaugugugcugaauucucuggcgcuagagcaaggccuguugcagcugcacaagguuuaccaguauaccuuacaccagguucaaaucaguucaugaccacagaugacuuucaaucuccaugugccuuacccugguaucauccaaccaaagagauuuuuauaccuggugagguuaagaaccuuauugaaaugugccaaguggauacccuaauaccaauaaauaacacuucucaaaaucugcguaacauuaauaaguacacuguucaauuaacuagucaaguaaauuuagcucaggaaaucuuugcaauaaaaguugauguggcuucacaaccuuuguccagcacacuucuuggagaaauuuguucauacuauacacacuggacugguagccuacgguuuaguuucauguuuugugguacugcuaauacaacacuuaaacuucugcuugccuacacaccaccuggaauagauaagccaaagaacaggaagcaagccaugcuugguacacacauaguaugggauguggguuuacaaucaacaauaucacuggugguaccuugggugagcgcuagucacuucagauauacaacaccagauacauauucugccgcuggcuacauaacaugcugguaccagacuaauuuuguguucccaccaaauacaccugcuacagcugauaugcuaugcuuuguuucugcuugcaaggauuuuugucuacgaauggccagggacacugauaugcacgugcaagaugugccaauuacucaaaauccuguugaaaaauacguugaugaaguccuuaaugagguucuagugguuccaaauaucaaagagagucacccaacuacaucaaauucagcuccugcuuuggaugcagcagagacuggccauacaaguaguauacagcccgaggauacaauagagaccagguuuguucaaacuucacagacuagggaugaaaugaguuuagaaaguuucuugggaagaucuggauguauccauauaucuacaauuacugugaauaacaaccuagauuaugaugaaaaucacuuugaucaguggcagauaacuauacaggaaauggcacaaauuagaaggaaguuugaguucuuuacuuacacuagauuugauucagaaaucacuuuagucccuuguauagcuggaaagggugaugauauuggacacauuguaaugcaguauauguaugugccccccggagcaccaauaccaaggaaaagagaugauuacacauggcaaucagguacuaaugcuuccguguuuuggcaacaugggcaaacuuuccccagauuuuccuuaccuuucuugaguguugcuucagcauauuacauguuuuaugaugguuaugauggugauacaccaggcucaauguaugggacgucagucaccaaccacaugggaacacugugcucgaggauaguuaccaacaaacagcagcaugagguugaaaucaccacgcguguguaucauaaggccaagcauguaaaggcuugguguccaagagcaccaagagcggugccuuauacacacacacgcucaaccaacuaugugccacaagauggugaaguuaagaucuuccucaaagagagagcuaguuuaaccacagcagggcccagugacauguaugugcauguugggaacuuaauuuacagaaaccuacaccucuuuaauucugaaaugcaugauucaauuuuagugucuuauuccucugacuuagucauauaccgaacaaauacgauaggugaugacuacauuccuacaugugauugcaccgaagccacuuauuacuguaaacauaaaaauagguauuauccaauuagagucacaagucaugauugguaugaaauucaggagagugaauacuauccaaaacauauacaauacaaucuuuuaauuggagagggaccaugugaaccuggugauuguggaggaaaguuauuauguaaacauggugugauugguauaaucacugcugguggagaaggacauguagcuuucauugaccucagacauuuccacugugcugaagaacagggcauaacugauuacauccacaugcuuggugaggccuucggcacaggauuuguugauagugucaaagaacaaauuagugccauuaacccaaucaacaauauuaguaagaaaauaauuaaguggcuccuuaggauuauaucagcuaugguuauaaucauaagaaauucaucugacccacagacaauaauugcuacauuaacucuaauugguugcucagguucuccuuggagauuucuuaaggaaaaauucuguaaauggacccaauuaacuuauauucacaaggaaucugacucauggcuuaaaaaauucacagaaauguguaaugcagcaagaggcuuggaauggauuggaaauaaaauaucaaaauucauugaauggaugaaauccaugcuuccucaagcucaauugaaggucaaguacuugagugaauuaaagaaauuaaaccuucuugaaaagcaaauagagcaucucaggguugcugauucucauacacaagaaaaaauaaaacaugaaauugacacccuucaugaucuuucauguaaauuucuuccacuuuaugcaagugaagcaaaaagaaucaaaauauuacacaacaaguguagugcaauuaucaaacaaaagaaaagaugugaaccuguugcuguuguaauucauggugagccugguacuggcaaaucuaugacuacaaacuuuuuagcuaggaugauaacaagugauagugauaucuacucccuaccuccagaucccaaauauuuugauggguaugaucaacagaguguggucaucauggaugauguuaugcaaaauccuaguggggaugacaugacuuuguuuugucagaugguaucuagugucacauucauaccaccuauggcugacuuaccagacaaaggaaaaccuuuugauucuagauuugugcuguguaguacuaaucauaauuuguuggcaccuccuacuauaaccucucuaccagccaugaauagaagauucuuccuugauuuggauauuauugugugugauaaauauaaagaugcacaaggaaaauuaaaugugugugcagcuuucaaacccugugauauugacacaaaaauuggaaacgcuaaauguugcccuuuuauaugugguaaagcugucauuuucagggaccgaaacacgugucaaacuuacacacuggcacaagucuacaaccuaauacuugaugaagacaaaaggcguaggcaagucauugauguaauggcagcaauauuucaaggaccaaucucacuuguaggaccaccaccagcagcaauaagugaucucuugcaaucagucagaaccccagaagugauuagauacugugaagugaacaaauggauaauaccugcugaauguaagguagagagggauuuaaacauugcaaacaccauuauuacaauuauugcaaacauuauuagcauuucuggaauuauauacgucauauacaaacucuuuugcacacuacaagguccauacucaggugaacccaaaccuaaaacaaaaauaccagaaagaagaguaguagcccaaggaccagaagaggaauuuggcagaucacucaucaaacauaacucaugcauagugaccacuucaaaugguaaauuuacagguuuagggauauaugacagaacgcugaucauaccaacacaugcugauccagguaaagaggugcaaauagauggcauuacaacccaaguacaagacucuuaugauuuauacaauaaggaugggauaaaguuagagaucacaguucuuaaacugaaaagaaaugagaaauuuaaagauauuagaaaauauaucccagaaaaugaagaugauuauccagacugcaauuuggcccuuucugcaaaccaaccagaaaccaccauaauuaauguuggggauguaguaucauaugguaauaucuuacucaguggaaaucaaacagcaagaaugcuuaaauacaacuacccaacaaaaucgggauauugugggggaauuuuguacaaaauuggucagguuuuaggcauucaugucggugguaaugggagagauggauuugcagcuauguuacugagauccuauuuuucagagacccaaggacaaauaauuuccacuaaaucuacuacugaguguaauuauccuaguguacauacaccaagcaaaaccaaguuacaaccuagugucuuuuaugauguuuucccugguaauaaagaaccugcugugcucucagaacaugauccuagauugaaaguugacuucaaggaggccuuguucuccaaguacaagggaaauggcccaugugagaugaaugaucauauuaagguagcaauuucccacuauucagcacaguugaugacacuagauauugacucaaaucccauuucuuuggaagauaguguuuuugguauggaaggucuagaagcucuugaccucaauaccagugcaggguuuccuuauguuucuauggguauuagaaagagggauuugauuaacaagcaaacaaaggacauuacuaaacugaagauggcauuagacaaguaugguguugauuuaccuaugguuacauuccuuaaagaugaacuuagaaagaaggaaaaaauuucugcuggcaagacaagggucauagaggcuaguaguguaaaugauacuguguuguuuagaacaaccuuuggaaaccuuuucucaaaauuucacuugaauccaggaauugugacugguucugcuguagguugugauccagagacauuuuggucaaagauaccaguaaugcuagauggugagugcauaauggcauuugauuacacaaauuaugauggaaguauacacccuauaugguuccaagcccuuaaagaagucuuauccaacuugggguuugacuccaauuuaauagacagaauauguaagucaaagcacauuuuuaaaaacauguauuaugaaguugaaggagggguaccaucuggcuguucuggaacaaguauauucaauacaaugauuaauaauauuaucauuagaacauuaguuuuagaugcauauaaaaauauugacuuggauaaauugaaaauaauagcauauggagaugaugucauauuuucauauaaauaucaauuggauauggaagcaauugcuaaagagggugucaaauauggucuuacuauaaccccagcagauaaaucaagugaauuuaagcaauugaauuacaauaaugugacuuuuuuaaaaagaggauuuaaacaagaugacaaauaucaauuuuugauacauccaaccuuuccaauugaagagauucaagaguccauacgauggacuaagaaaccaucucagaugcaggaacacguuuugucguugugucacuuaauguggcauaauggcaaagacguauacaagcaguuugagcagaagauacgcaguguuagcgcuggacgugcacuguauauuccucccuacgagcugcuuuugcacgagugguaugaaaaauuuuagauuguuuagauauagaaguaauaaacaauuaguuuuuuaguuuuau

SEQ ID NO: 67 - RNA, 7213 nt, Human rhinovirus
uuaaaacagcggauggguacccuaccauccgacccacuggguguaguacacugguacauuguaccuuuguacgccuguuucucccuauuguaccuucccucacaauccuaaccccuguaacguuagaagaugugcaacucgugcaauaggagauacugcaaccagugguaucaagcacaagaacuucuguuuccucggagcggaguauagaugguccccaccgucaaaagcucuuaaccguuauccgccaaucaacuacgugacgacugguagcaycauuuugacacuuugacguucgaucagguaggcuuaccccaccuacuaguuuggccgaugaggcugggagucccucacagguaacugugucccagccugcguggcggccaacccagcaauugcugggacgccaauuuguugacauggugugaagaucuuaaugugcuugguugugaguccuccggccccugaaugcggcuaaccuuaaccccggagccuugugucacaagccagugacauuaaggucguaaugaguaauuucgggaugggaccgacuacuuuggguguccguguuuccuguuuuucuuuaugauugucuuauggucacagcauauaguaauuauauacugugaucaugggcgcucagguuucaacucaaaggagugguucucacgaaaaccaaaauauucuuacaaauggaucacaucaaaccuucacuguuauuaauuacuauaaggaugcagccagugcaucaucagcugggcaaucuuuuucaauggacccaucuaaauucacugaaccagucaaagaucuaaugcuuaaaggagccccagcacuaaauuccccaaauguugaggcaugugguuacagugacagagugcaacaaaucacccucggaaacuccaccauaacuacccaagaggcagcaaaugcuguugucuguuaugcugaauggccugaguauuuaccagauaaagaugcuagugaugugaacaaaaccucaaaaccugacacaucaguguguagauuuuacaccuuagauaguaaaacuuggaauaauacaucaaaagggugguguuggaaacugccagaugcacucaaagauauggguguauuuggucaaaacauguucuuucauucacuuggcagaucuggguacaccauacauguccaguguaaugccaccaaauuucacaguggcuguuugcuaguagugguuauuccagaacaccaauuggcaucacaucaaggaggaaauguaucagucaaauacacucucacacauccuggugaagcugguauugacuugagcaaagcagaaguagauaaaggaccuuccaacaauccaguuuauucaaugaauggcacauuacuaggcaaucuacuuauuuucccucaccaguucaucaaccuacgaacaaauaacacagcaacuauuguaguaccauacaucaacucagugccaauugacucaaugacacgccauaacaacgugucuuuauuaauuauaccuauuuccccuuuaacugcucccacaaauuccccaaacacauuaccagugacugugacuauagcaccaaugugugcagaauuuaguggaauuagaucuagaucaauuguaccacagggguugccgacuacaacucugccagguucaggucaauuuuugacaacugaugauagacaaucacccagugcauuaccauguuaugagccuacaccuaagauacacauuccaggggagguuaaaaacuuacuggaaaugauucagguagauacauuaauaccgaugaauaacaccacugcuacagaugagguuggaaauuaccucauaccucuaaauguuaauaaacagaaugaacagauauuuggaacaaaucuuuucauuggugauggaguuuucaaaacuacauuauugggggaaauagcucaguacuacacacacugggcuggaucacucagguuuucauugauguauacagguccugcauuaucaagugcuaaacuuauauuggcauacacacccccugguguugcuggaccuaaaaacagaaaagaagcaaugcuuggaacacaugugguaugggauauagguuuacaaucuaccauuauuaugaacauacccuggacuucugguguacaguuuagauauacugauccagacacauauacaagugcuggucacuugucauguugguaucaaacauccuugauauugccaccucaaaccaguggcacugcauauuuacuauccuucauuagugcuuguccagacuuuaaauuaagauuaaugaaagauacccaaacuaucucacaaacugaugcacuagaagaaggguugggagaugaacuagaggaagucauagucgaaaaaacgaaacagacauuggcuucaguugcaacagguucaaaauauacccaaaaagugccaucauugucagcuaaugagacaggagcaaccaugcccacaguaccaucagauaauauagaaaccagaacuacauauaugaauuuuacaggaucugaaacagauguggagugcuuuuuggguagagcagcauguguacauauaacagaaauugaaaauaaagacccaacugacauugaaaaccagaaagaggcuaaguuguucaaugauuggaaaauuaauuuguccaguuuaguucaauuaagaaagaaguuagaacucuuuacauaugucagauuugauucagaauacacaauccuugcuacagcuucgcaaccaacucaaucuaguuauucuaguaaucuuacuguccaggcuauguaugugccaccaggagcacccaauccuaaaacuuggaaugauuacacauggcaaagugcaucaaaccccagugucuucuucaagguaggagauacagcuagguuuaguguuccauucgugggacucgcuucagcauauagcuguuucuaugauggcuauucacaugauaaugaagauacuccuuauggcauaacagucuugaaccacauggguagcauugcuuucagaguaguuaaugaucaugauuugcauaagacaguaguaaaaaucagaguguaucauagagcaaaacacauucaaacuuggauccccagagcuccuagggcguugccuuaugagacaauuggccgcacaaauuucccaagaaauccaccuaaaauaaucaagaaaagagacacaauaaauacauauggcuuaggacccagguuugggggaauauuuacuggaaaugucaagauuaugaauuaccaucuaaugaccccagaggaucauuuaaacuuagugacaccuuacccaaguagagaucuagcaauuguruccacaggagcacauggagcagaaacuauuccucauugcaguuguacgucagguguauacuacuccagauauuauaacaaauuuuauccaauaauaugugaaaagccuaccaacauuuggauagaggguggaccauauuacccuagcagauaccaaucagguguuaugaaagguguuggucccgccgaaccaggagacuguggaggcaucuuacgaugcauccauggaccaauugguuuguugacagcaggugggaguggauuuguuuguuuugcugacaucagagaauuggaaugcauugcagaggaacaagguaucagugacuacauaucaaacuuaggaaaagcuuucggugcugguuucaccgaccaaauuacaagcaaaauuggggaauugcaagauacaguuaaagauuaucucacaacuaaaauguuaucuaaagugguuaaaaugguaucagcuuugguuauuauuuguagaaaucaugaagauuuaguaacaguaacagcuaccuuggcauuacuggggugugaugguucucccuggagauuuuuaaaaauguaugugucaaaacauuuucaagugccuuauauagagagacaagccaaugauggaugguuuagaaaguucaaugaugcuugcaaugcagcuaaagggcuugaauggauagcuaauaaaaucucaaaauuuauagauuggguuaaaaccaaaauucucccacaagcuagagagaaacuagauuucugcagaagauugaagcaguuagauauccuagaaaggcagauuaccacaaugcacaucucaaaucccacucaggaaaaaagggaacaacucuuuaacaacauauugugguuagaacaaaugucccagaaauuugcgccacuauaugcuacugaagggaaaagaauuagggaucucaaaaauaaaauguuaaauuacauacaauucaaaucaaaacaaagaacugaaccaguuuguguacuaauccauggcacaccugggucuggaaaauccuugacuacaucaaucgugggacgagcauuagccgaacacuacaauucagcaguguacucauuaccaccagauccuaaacacuuugauggauaccagcaacaagaaguugucaucauggaugacuuaaaccagaacccagauggucaggauaucaguauguuuugucagaugguuucuucaguugacuuuuugccaccaauggcuaguuuagauaauaaagguauguuguuuacuaguaauuuuguuuuagccucuacaaauucaaacacuuugagcccuccuacuauccucaauccagaagcucuaacaagaagauuugguuuugauuuggacauuugcuugcacucuaccuauacaaagaauggcaaauugaaugccucgauggcaacuagucugugcaaggauugucacaaacccuccaauuucaagaaauguugucccuugguuugugguaaagcuaucaguuuaguagauagagccacuaauguuagauacaguguugaucaguuaauuacugcaauuauaaaugauuauaacaacaagauuaaaauaacagauucucuugaaacucuuuuccagggacccguauacaaagacauugagauugauguuugcaauacuccucccccugaaugcauaaaugaucuccucaaaucaguagauucugaggaaguuagagaauauuguaaaaagaaaaaguggacuauuccagaaauacccacagacauugagagagcagugaaucaggcaaguaugauuauaaauacaauucugauguuuguuagcacuuuaggcauaguguauguuaucuauaaauuguuugcacaaacccaggguccuuauucuggcaauguagcucauaauaaacuaaaacccccuacacuuagaccagugguaguucagggaccuaauacagaauuugcauugucucuccuuagaaaaaacauuguaacaaucacuacagaaaaaggggaguucacugguuuaggcauuuaugaucguguguguguuguaccuacacauucacauccaggucaagaagugcuauuaaauggacagaaaauaaaaguuagugauaaguauagguuaauugauucagacagcauuaaucuagagcuuacaguguuaacacuagauagaaaugagaaguuuagggauauuagaccuuucaucugugaagauccagaaggcauggaagccacauuaguaauacacucuaauaauuucacaaacaccauauuggaggugggacaaauuaccauggcaggucuaauaaacuuaaguagcacacccacaggaagaaugauacgguaugaauauccaaccaaaacaggacaauguggaggagucuuaugcuccacaggcaaaauuuuuggaauucaugucggagguaauggcagacaaggauucucagcccagcuuagaaagcaauauuuuguagaaaaacagggugaaauugugucaaaacagaaagugaaggaauuaggguuacauccuauaaacaccccauccaagacuaaauuacaucccaguguauuuuacaauguauuugaagguaauaagcaaccugcuguguugaaagacaaugaucccagauuggaagucaauuucucugaaucuuuguuuucaaaguauaaaggcaauguugaaaugaaaccaacuccaaauaugauuguugcaguagaucauuaugcugggcaauugaugucuuuggauauaccaguaaaggaguuaaguuuaaaagaggccuuauauggaguugauggacuugaaccccuagacauaacaaccagugcagguuauccauauguuaguuugggaauaaagaaaagagauauucuaaacagagagacccaagacayaacaaaaaugcaggcuuauuuagauaaauauggaauagacuugccacuuguuaccuauauuaaagaugaacuaagaaguguugauaaaguaagauuaggcaaaaguagauugauugaagcuucuaguuugaaugauucugugaauaugagaaugaaguuagggagucucuauaaaacuuuucaccaaaauccuggcauuauaacugguucagcaguugggugugauccagaugucuucuggucaguuauaccaugcuugauggaaggacacuuaauggccuuugauuacucuaacuuugaugcuucccuaucaccagugugguuugauugcuuggaaaaaguucuugaaaaacuuggguuuaaagauuccaacuuaauuagauccauaugcaacacacaucauauuuucagggaugagauuuaugcuguuagaggaggaaugccaucagggugcucuggaacuagcauuuucaauucuaugauuaauaauauaauaauaagaacuuugauucuagaugcuuauaaggguauagaucuugacaaauugaggguuauugcauauggagaugaucugauagucucauacccuuucgaacuugauccaucaguucuagcaucaauggggaagaaauauggauugacuaucacuccuccagacaaaucugaaaauuucacaaaaaugacaugggaaaacaucacuuuucuaaagcgauauuuuaaaccagacaaggaauuccccuuccuuauucacccagucaugccaaugcaagacauucaugagucuauuagguggacaaaagacccaaagaauacccaggaucauguaagaucuuuaugcauguuagcauggcauucaggugagagugaguauaaugauuuccuuucuaaaauuagaacaacagacauaggaaagugcuugaacuugccugaguauaguguacuuagaagaagaugguuagacauguuuuaaauaaugauauagaaacuuaauuugugugcagaauuuagaaucuau

SEQ ID NO: 68 - RNA, 7150 nt, Human rhinovirus
uuaaaacugggaguggguuguucccacucacuccacccaugcgguguuguacucuguuauuacgguaaccuuguacgccaguuuucccacccuuccccacaauguaacuuagaaguuuguacaauaugaccaguaggugacaauuauccagauugucaaaggucaagcacuucuguuuccccggucaaugaggauaugcuuuacccaaggcaaaaaccuuaaagaucguuauccccacacugccuacacagagccuaguaccacuuuugauguaguuagguuggucgcucccugcaaacccagcaguagaccuggcagaugaggcuggacauuccccacuggcgacagugguucagccugcguggcugccugcucacccuuuugggugagaagccuaauuauugacaaggugcgaagagccgcgugugcucagugugcuuccuccggccccugaauguggcuaaccuuaacccugcagccguugcccauaauccaauggguuugcggucguaacgcgcaagugcgggacgggaccaacuacuuuggguguccguguuuccuguuuuucuuuugauugcauuuuauggugacaauuuauagaguauagauugucaucaugggugcacagguaucuagacagaauguugggacacacuccacacaaaauucagugagcaaugguucuagcuuaaacuacuucaacaucaauuauuucaaggaugcagccucaaguggugcuucuagauuagauuucucccaagauccuagcaaauucacugacccuguuaaggauguuuuagaaaaagguauuccaacacuccaaucaccaacaguugaggcuugugguuauucagacaggcuaauacaaauaacccgaggagauuccacuauaacgucucaggauauugcaaaugcaguugucgcuuauggugucuggccaucauaccuaacuccagaugaugcaacugcuauugacaaaccuacacaacccgauacuucaucuaauagauucuacacucuggauagucguuccuggacaucugccucaucugguuggugguggaaauugccugaugcccuuaagaacauggguauuuuuggugaaaacauguuuuaucacuuucuagggagaucuggauacacaauacauguacagugcaauucuagcaaguuccaucaggguuuauugauaguugcugcuaucccagaacaucaauuggcaucugcgacaaguggaaauguaucaguuggauacaaccauacccacccaggugagcaagguagagaaguggugccaucacggacuucuagugacaacaaaagaccuagugaugauaguugguuaaauuuugaugggacauuacuugguaaccugccuauuuauccccaccaauauauuaauuuaaggaccaauaauucagcuacccuuauuuuaccuuauguuaaugcuguaccaauggauucuaugcuuagacauaauaauuggaguuuagucauaaucccaauaugcccucuucaaguucaaccaggggggacacaauccauaccuauaacaguaucaaucagcccuauguuuucagaauucucagggccgaggaauaagguuguguuuaguaccacucaagguuugccaguuauguuaacacccggaucuggucaauuucuaacaacagaugacacucaguccccgucagcauuuccauauuuccauccaaccaaggaaauauucauaccuggacaggucaggaauuuaauugaaaugugucaaguugauacacucauuccuguuaauaacacacaggaaaauguaagaucuguaaauauguacacuguugacuugcgcacacaaguugaucuagcuaaagaaguauucuccauaccaguagauauugccucacaaccuuuagccacuacccucauaggugaacuugcaaguuauuauacacacuggacugguagccuacgcuucagcuuuauguuuugugguucugcuagcucuacuuugaaguuauuaauugcauacacaccuccugguguuggaaaaccuagauccaggagagaagccaugcuugguacacacuuagugugggacgugggauugcaguccacugccucgcuaguuguaccauggguuagugcuagccauuucagauucacuacaccugauacuuacucuucagcugguuauaucacaugcugguaccagacuaacuuuguuguaccugauaguacaccagacaaugcuaaaauggugugcaugguuucugcauguaaagauuuuuguuuaagauuagccagagacacuaaccuacacacacaagaagggguacucacacaaaauccaguugaaaauuacauagauaguguguuaaaugaaguccuugugguaccaaauauucaaccuaguacaucuguaucaagucaugcagcgccugcauuggaugcugcagaaacuggacacaccagcucuguucaaccugaagauaugauugaaacuagauaugucauaacugaccagacaagggaugaaacaaguauugaaagcuucuuggguagaucagguuguauugcuaugauagaauuuaauacaaguagugauaaaguugaacaugauaaaauuggcaaaggauucaaaacguggaaaaucagucuccaagaaauggcacaaauuagaaggaaauuugaauuauucacauauacaagauuugauucagaaauaacaauaguuacugcagcugcaacuaagggagaugauaauggacacauaguguugcaguuuauguauguacccccaggagcaccuguccccgaaaaacgugaugauuacacauggcaaucaggaacaaaugcaucuguguuuuggcaagaaggacaaccauacccuagauucacaaucccuuuuaugagcauugcaucagcuuauuauauguuuuaugaugguuaugauggagauagugcggcaucaaaauaugguucuguagucacuaaugacaugggaacuauaugugucagaaugguuacaucuaaucagaagcaugauuuaaacauugugugucgcauuuaccacaaggcuaagcacauaaaagcuugguguccgcgcccaccaagggcuguugccuaccaacacacacacucaacuaacuacauaccacucaauggugaggcuacaacucagaucaaaacuagacccgauguuuuuaccaucacaaacgucggaccaucuaguauguuuguacauguagguaaccuaaucuauagaaaucuucaucuuuuuaauucugaucuugaugauucuauucuuguaucauauucuagugaucuagucauauaccgaacaaacacugaagguaaugauguaauccccaauugugauuguacugaauguacauauuacugccaccacaaagauagauauuuucccaucaaagucacugcacaugauugguaugagauucaagaaucagaauauuacccaaaacauauccaauauaaucuccugaucggagaggguccaugugaaccaggggauuguggaggaaaacuacuguguaagcaugguguuauagguaugguuacagccggaggugagggccauguugcuuuuauugaccuaagaaaauuccaaugcgcugaagaacaaggguuaucugauuauguggaacaucuuggacaaguuuuugguguagguuuuguagacaguaucaagcaacaaguaaauuucaucaaccccacuagcaagauuggcucaaaaguaaucaaaugguuguugagaauaguuucagcuaugauaauaaugguaaggaauaguucugacccacaaacuguuauugccacucuuacccuuuuagguuguucagguucaccauggagauuucuuaaagaaaagcuuugugcguggcuucagcuuaguuaugugcacaaacagucugauucauggcuuaagaaauuuacugaagcauguaaugcagcacgcggacuagaauggauuggacaaaagauauccaaauuuauagauuggauaaagagcaugcugccacaagcucaauuaaaaauugacuaccuaacuaaauuaaaacaacuuaaucucuuggagaaacaaauagaaacaaucagacuugcaccugcuagugaucaagagaaaauuuacauugaaauaaacacccuccaugaucuauccuugaaauucuuaccacuguaugcaucugaagcacgaagaauuaagaauuuauauaucaaguguagcaacguuaucaaaggaggaaagaggaaugaaccaguugcaguucuaauacaugguucuccuggcacuggaaaaucucuugccaccucuguucuugcucgaauguuaacuguugaaacugauauauauucuuuacccccagauccuaaauauuuugauggguaugaccaacagaguguuguuaucauggaugauaucaugcagaauccuaguggugaagauaugacucuguuuugccaaauggugucaagugucccuuucauaccuccuauggcagaucuuccagauaagggaaaaccauuuacaucuaaauuugugcuugcaaguaccaaucacacucuauuaacaccaccaacaguguccucauuaccagcaauggcaaggagauuuuacuuugaucuagacauucaaguuaaaaaagaauaucuuuuagaugguaaauuagauauagcaaagaguuuucggccaugugaugucaauacuaaaauaggcaaugcuaagugcuguccauuuaucuguggaaaagcuguagaguuuaaagauagaaauucauguacaaccuugucauuaucucaacuauauagucacauaaaagaagaagacaggagaagaagcagugcagcucaagcaauggaagccauauuucaagguauagaucuccaauccccuccaccuccagcuauagcugaucuucuuagaucuguaaaaacgccagagauuaucaaguauugucaagacaauaacuggauuguuccagcagaguguuccauugagagagauuuagggauagcaaacaugacuauagguauaauagcuaauguaguuucuauaguagguguuauuuacauaauuuauaaauuguuuuguacacuucaagguccauacucaggggaaccuaaacccaaaagcagagcuccagagagaagaguaguuacucaaggcccagaggaagaauuuggucgcucacuacucaaacauaauugcuguguugugaccacugauaaaggcaaauuuacaggucuugguauauaugaccaagucaugguacuuccaacucauucugauccaggcucugagaucuuaauagauggagugaaaguuaaagucucugauuccuaugauuugcacaaccaugagggagucaagcuagaaaucacaguaguaaaauuagcuagaaaugaaaaauuuaaagauaucagaaaguauuuacccucacgcgaggaugauuauccugcuuguaaccuugcuuuauuagcuaaucaggaugagccaacaauaauaaguguaggugaugcaguaucuuaugguaacaucuugcuaagugguacuaauacugcacgaaugauuaaguaccacuacccaacaaaagcuggauauuguggggguguuuuauauaaaguuggcuccauucuuggcauacauguuggugguaaugguagagauggauuuucugcaaugcuucuuaaaucuuacuuuggugaaacucagggcuuaauuacuaaagagcuaccuguaucuguaaagaauuuaccauccauacauguuucauccaaaacccggcuacagcccaguguuuuucaugauguuuucccuggaacaaaggagccugcaguccuuaguaguaaugauccaagauuagaaacugauuuugauucagcacuuuucucuaaauauaaaggcaacccugcuugucaagugacuccacacaugaaaauugcuguagcacauuaugcagcacaguuaucuacacuagacauaaacccccaaccccucucauuggaagagaguguguuuggcauugagggauuagaagccuuagaucuaaauacuagugcaggguuuccuuacgucucauuaggaauaaagaagaaagaucuuauagauaaaaagacuagagacauuacaaaacuuaagaaagcaauugaugaauacgguauugaucuacccaugguuacuuuuuuaaaagaugaacucagaaagaaggagaaaauaaaagauggaaaaacuagaguuauagaggccaauagugugaaugauaccguguuguucagaaguguguuuggaaaucucuucucugcuuuccacaaaaauccagguauaguuacuggcucagcaguggggugugauccugagguauucuggucaacuauaccucuuauguuagauggugaguguuugauggccuucgauuacucaaauuaugaugguaguuuacauccuguuugguucaaaugucuuaguaugcuucuagaggacauagguuucccuucucaacuuauuaaucaaaucuguaauucuaaacauauauacaaaucuaaauauuaugaaguagaaggagguaugccgucuggaugugcugguacuaguauuuuuaauacaauaauuaacaauaucaucaucagaacucugguguuagaugcuuacaagaauauagauuuagacaaauuaaaaauuuuggcauauggagaugaugucauuuuuuccuacaacuuuaaacuugacauggcaguucuugcuaaagaaggggaaaaguauggacuaacaauuacuccugcagacaaaucugauguuuuccaagaguuaacuuacaagaaugugacuuuucucaaaagaggauucagagcugaugaacgccacucuuuucuugugcauccuaccuuuccuguggcugaaauuuaugauuccauuagauggacuaagaacccuucauguaugcaagagcacgugcuaucuuugugucacuuaauguggcacaacgguagacaugcauaucaggaauucaucaaggguauacgcaguguaucugcuggucgggcacuguauauaccagcuuaugaaguucuugagcaugaaugguaugaaaaauuuuagauauaaaacuguuaaauauagcuaguuuauuaguuuuau

SEQ ID NO: 69 - RNA, 7152 nt, Human rhinovirus
uuaaaacugggaguggguuguucccacccacuccacccaugcgguguuguacucuguuauuacgguaacuuuguacgccaguuuucuccacccuuccccacaauguaacuuagaaguuuguacaauaugaccaauaggugacaauuauccagauugucaaaggucaagcacuucuguuuccccggucaaugaggauaugcuuuacccaaggcaaaaaccuuaaagaucguuauccccacacugccuacacagagccuaguaucacuuuugauguaguuagguuggucgcucccugcaaacccagcaguagaccuggcagaugaggcuggacauuccccacuggcgacagugguccagccugcguggcugccugcucacccuuuuugggugagaagccuaauuauugacaaggugugaagagccgcgugugcucagugugcuuccuccggccccugaauguggcuaaccuuaacccugcagccguugcccauaauccaauggguuugcggucguaaugcgcaagugcgggacgggaccaacuacuuuggguguccguguuucuuguuuuucuuuugauugcauuuuauggugacaauuuauagaguauagauugucaucaugggugcacagguaucuagacagaauguugggacacacuccacacaaaauucagugagcaaugguucuagcuuaaauuauuucaacaucaauuauuucaaggaugcagccucaaguggugcuuccagauuagauuucucccaagauccuagcaaauucacugacccuguuaaagauguuuuagaaaaagguauuccaacacuccagucaccaacaguugaggcuugugguuauucagacagacuaauacaaauaacccgaggagauuccacuauaacgucucaggauauugcaaacgcaguugucgcuuaugguguuuggccaucauaccuaacuccagaugaugcaacugcuauugacaaaccuacacaaccugauacuucaucuaacagauucuacacucuggauagucgcucuuggacaucugccucaucuggcuggugguggaaauugccugaugcccuuaagaacauggguauuuuuggugagaacauguuuuaucacuuucuaggaagaucuggauacacaauacauguacaguguaauucuagcaaguuccaccaggguuuauugauaguugcugcuaucccagaacaucaauuggcauccgcgacaaguggaaauguaucaguuggauacaaccacacccacccaggugaacaagguagagagguggugccaucacggucuucuagugacaacaaaagaccuagugaugauaguugguugaauuuugaugggacauuacuugguaaccugccuauuuauccccaccaauacauuaauuuaaggacuaauaauucagcuacccuuauuuuaccuuauguuaaugcuguaccaauggauucuaugcuuagacauaauaauuggaguuuaguuauaaucccaauaugcccucuucaaguucaaccaggggggacacaauccauaccuauaacaguaucgaucagcccuauguuuucagaauuuucagggccaaggaauaagguuguguuuagcaccacucaagguuugccaguuauguuaacacccgggucuggucaauuucuaacaacagaugauacucaguccccaucagcauuuccauauuuccauccaaccaaggaaauauucauaccuggacaggucaggaauuuaauugaaaugugccaaguugauacacucauuccuguuaauaacacacaggagaauguaagaucugugaauauguacacuguugacuugcgcacacaaguugaucuagcuaaagaaguguucuccauaccaguagauauugccucacaaccuuuagccacuacccucauaggugaacuugcaaguuauuauacacacuggacugguaguuuacgcuucagcuuuauguuuugugguucugcuagcucuaccuugaagcuauuaauugcauacacaccuccugguguuggaaagccuagauccaggagagaagcuaugcuuggcacacacuuaguaugggacgugggauugcaguccaccgccucacuaguuguaccaugggucagugcuagccacuucagauucacuacaccugauacauacucuucagcugguuauaucacaugcugguaccagaccaacuuuguugugccugauaguacaccagacaaugcuaaaauggugugcaugguuuccgcaugcaaagauuucuguuuaagauuagccagagacacuaaccuacauacacaagaagggguacucacacaaaauccaguugaaaauuacauagauagugucuuaaaugaaguccuuguaguaccaaacauucaaccuaguacaucuguaucaagucaugcagcaccugcauuggaugcugcagaaacuggacacaccagcucuguucaaccugaagauaugauugaaacuagauaugucauaacugaccagacaagggaugaaacaaguauugaaaguuucuuagguagaucaggguguauugcuaugauagaauuuaauacaaguagugauaaaguugaacaugauaagauuggcaaaggauuuaaaacauggaaaaucagucuccaagaaauggcacaaauuagaaggaaguuugaauuauucacauauacaagauuugauucagaaauaacaauaguuacugcagcugcaacuaagggagaugauaauggacacauaguguugcaguuuauguauguacccccaggagcaccuguccccgaaaaacgugaugauuacacauggcaaucaggaacaaaugcaucuguguuuuggcaagaaggacaaccauacccuagauucacaaucccuuuuaugagcauugcaucagcuuauuauauguuuuaugaugguuaugauggugauaaugcggcaucaaaauauggcucuguagucacuaaugacaugggaacuauauguguuagaaugguuacauccaaucagaaacaugauuugaauauugugugucgcauuuaccacaaggcuaaacauauaaaagcuugguguccacgcccaccaagggcuguugccuaccaacacacacacucaacuaacuacauaccacucaauggugaggccacaacucagaucaaaacuagacccgauguuuuuaccauuacaaacguuggaccaucuaguauguuuguacauguagguaaucuaaucuauaggaaucuucaucuuuuuaacucugaucuugaugauucuauucuuguaucauauucuagugauuuagucauauaccgaacaaacacugaagguaaugauguaaucccaaauugugauuguacugaauguacauauuacugccaccacaaagauagauauuuucccaucaaagucacugcacaugauugguaugagauccaagaaucagaauauuacccaaaacauauccaauauaaucuccugaucggagaggguccaugugaaccaggggauuguggaggaaaacuacuguguaagcaugguguuauagguaugguuacagcuggaggugagggucauguugcuuuuauugaccuaagaaaauuccaaugcgcugaagaacaaggguugucugauuauguggaacaucuugggcaaguuuuugguguagguuuuguagauagcaucaagcaacaagugaauuuuaucaaccccacuagcaagauuggcucaaaaguaauuaaaugguuguugagaauaguuucagcuaugauaauaaugguaaggaauaguucugauccacaaacuguuauugccacucucacccuuuuagguuguucagguucaccauggagauuucuuaaagaaaagcuuugugcguggcuucagcuuaguuauguacacaaacagucugauucauggcucaagaaauuuacugaagcguguaaugcagcacgcggacuagaauggauuggacaaaagauauccaaauuuauagauuggauaaagaguaugcugccgcaagcucaguuaaaaauugacuaccuaaccaaauuaaaacaacucaaucucuuagagaaacaaauagaaacaaucagacuugcaccugccagugaucaagagaaaaucuacauugaaauaaacacccuccaugauuuauccuugaaauucuugccacuguaugcaucugaagcacgaagaauuaagaauuuguauauuaaguguaguaacguuaucaaagggggaaagaggaaugaaccaguugcaguucuaauacaugguucuccugguacuggaaaaucucuugccaccucuguucuugcucgaauguuaacuguugaaacugauauauauucuuugccuccagauccuaaauauuuugauggguaugaccagcagaguguuguuaucauggaugauaucaugcaaaauccuaguggugaggauaugacucuguuuugccaaaugguaucaagugucccuuucauaccuccuauggcagaccuuccagauaagggaaaaccauuuacaucuaaauuugugcuugcaaguacuaaucacacucuauugacaccaccaacaguguccucauugccagcaauggcaaggagguuuuacuuugaucuagacauucaaguuaaaaaggaauaucuuuuagaugguaaauuagauauagcaaagaguuuucggccaugugauguuaauaccaaaauaggcaaugcuaagugcuguccauuuaucuguggaaaagcuguagaguucaaagauagaaauucauguacaaccuugucauuaucccaacuauauagucacauaaaggaagaagacaggaggagaagcagugcagcucaagcaauggaagccauauuucaagguauagaucuccaauccccuccaccaccagccauagccgaucuucuuaggucugugaaaacaccagaaauuauuaaguacugucaagacaacaacuggauuguuccagcagaguguucuauugaaagagauuuagggauagcaaacaugacuauaggcauaauagcuaauguaguuucuauaguagguguuauuuauauaauuuauaaauuguuuugcacacuccaagguccauacucaggggaaccuaaacccaaaagcagagcuccagagagaagaguaguuacucaagguccggaggaagaauuuggucgcucacuacucaaacauaauugcuguguugugacuacugacaaaggcaaauucacaggucuugguauauacgaccaagucaugguacuuccaacucauucugauccggguucugagaucuuaauagauggagugaaaguuaaaguuucugacucuuaugauuugcacaaccaugagggagucaaguuagaaaucacaguaguaaaauuagcuaggaaugagaaauuuaaagacaucagaaaguauuuacccucacgugaagaugauuauccugcuuguaaucuugcuuuauuagcuaaucaggaugagccaacaauaauaaguguaggugaugcagaaucuuaugguaacaucuugcuaagugguacuaauacugcacgaaugauuaaguaccacuacccaacaaaagcuggauacuguggggguguucuauauaaaguuggcuccauucuuggcauacauguuggugguaaugguagggauggauuuucugcaaugcuucuuaaaucuuacuuuggugaaacucagggcuuaauuacuaaagaacuaccuguaucuguaaagaauuugccaucaauacauguuucauccaaaacccgacuacagccuaguguuuuccaugauguuuucccuggaacaaaagaaccugcaguccuuaguaguaaugauccaagauuagaaacugauuuugauucagcacuuuucuccaaguauaaaggcaauccugcuugucaagugacuccacauaugaaaauugcuguagcacacuaugcagcacaguuaucuacacuagauauaaacccccaaccccuuucauuggaagagaguguguuugguauugagggauuagaagccuuagaccuaaauacuagugcaggguuuccuuaugucucauuggggauaaagaagaaagaucuuauagauaaaaggacuagggauauuacaaaacuuaagaaagcaauugaugaauacgguauugaucuacccauggucacuuuuuuaaaagaugaacucagaaagaaagagaaaauaaaagauggaaaaacuagagucauagaggccaauaguguaaaugauacuguguuauucagaaguguguuuggaaaucucuucucugcuuuccacaaaaauccagguauagucacuggcucagcaguggggugugacccugagguauucuggucaaccauaccucucauguuagauggugaguguuugauggccuuugauuacucaaauuaugaugguaguuuacauccuguuugguucaaaugccuuaguaugcuuuuagaggauauagguuucuccucucaacucauuaaucaaaucuguaauucuaaacacauauacaaaucuaaauauuaugaaguagaaggagguaugccaucuggaugugcugguaccaguauuuuuaauacaauaaucaauaauaucaucaucagaacuuugguacuagaugcuuacaagaacauagauuuagauaaauuaaaaauuuuagcauauggagaugaugucauuuuuucuuacaacuuuaaacuugacauggcaguucuugcuaaagaaggggaaaaguauggacuaacaauuacuccugcugacaaaucugauguuuuccaagaguuaacuuauaagaaugugacuuuucucaaaagaggauucagagcugaugaacgccacucuuuucuugugcaucccaccuuuccuguggcugaaauuuaugacuccauuagauggacuaagaacccuucauguaugcaagaacaugugcuaucuuugugucacuuaauguggcacaaugguagacaugcauaucaggaauuuaccaaagguauacgcaguguuucugcuggucgggcacuguauauaccagcuuaugaaguucuugagcaugaaugguaugaaaaauuuuagauauaaaacuguuaaauauaguuaguuuauuaguuuuau

SEQ ID NO: 70 - RNA, 7152 nt, Human rhinovirus
uuaaaacugggaguggguuguucccacucacuccacccaugcgguguuguacucuguuauuacgguaacuuuguacgccaguuuuucccacccuuccccauaauguaacuuagaaguuuguacaauaugaccaauaggugacaaucauccagacugucaaaggucaagcacuucuguuuccccggucaaugaggauaugcuuuacccaaggcaaaaaccuuaaagaucguuauccccacacugccuacacagagcccaguaccauuuuugauauaauuggguuggucgcucccugcaaacccagcaguagaccuggcagaugaggcuggacauuccccacuggcgacagugguccagccugcguggcugccugcucacccuucuugggugagaagccuaauuauugacaaggugugaagagccgcgugugcucagugugcuuccuccggccccugaauguggcuaaccuuaacccugcagccguugcccauaauccaauggguuugcggucguaaugcguaagugcgggaugggaccaacuacuuuggguguccguguuuccuguuuuucuuuugauugcauuuuauggugacaauuuauaguguauagauugucaucaugggugcacaaguaucuagacaaaauguugggacacacuccacacaaaauucagugagcaauggaucuagcuuaaauuauuucaacaucaauuauuuuaaagacgcagcuucaaguggugcuucuagauuggauuuuucucaagacccuaguaaauuuacugauccuguuaaagauguguuagaaaaggguauuccaacacuucaaucaccaacaguugaagcuugugguuauucagacagacuaauacagauaacccgaggagauuccacuauaacaucccaagauauugcaaaugcaguuguugcuuaugguguguggccaucauacuugacuccagaugaugcgacugcuauugacaaacccacacaaccugauacaucauccaacagauucuacaccuuggacagucguucuuggacaucugccucaucuggauggugguggaaauugccugaugcccuuaaaaacauggguauauuuggugaaaauauguuuuaccauuuucuagggagaucuggauacacaauacauguacaauguaauucuagcaaguuucaucaggguuuauuaauaguugccgccaucccagaacaucaauuggcaucugcaacaaguggaaauguaucagucggguacaaucacacccacccaggugagcaagguagagaaguaguaccaucacggacaucuagugauaauaaaagaccuagugaugacaguugguuaaauuuugauggaacauuacuugguaacuuaccuauuuauccccaccaauacauuaaucuaaggacuaacaauucagcuacccuuauuuuaccuuaugucaaugcuguaccaauggacucuaugcuuagacauaauaauuggagcuugguuauaaucccaauaugcccucuucagguccaaccuggggggacacaauccauaccuauaacaguaucaauuagcccuauguuuucagaauuuucagggccaagaaauaagguuguguuuaguaccacucaggguuuaccaguuauguuaacaccuggaucugggcaauucuuaacaacugaugauacucaauccccaucagcguuuccauacuuccacccgaccaaggaaauauuuauaccuggacaaguuaggaauuuaauugaaaugugccaaguugmcacacucauuccuguuaacaauacacaggaaaauguaagaucugugaauauguacacuguugauuuacgcacacaaguugauuuagcuaaagaagucuuuucuauaccaguagauauugccucacaaccuuuagccacuacucucauaggugaacuugcaagcuauuacacacacuggacugguagucugcgcuuuagcuuuauguuuugugguucugcuagcucuacuuugaaacuauuaauugcauacacuccuccugguguuggaaaaccuaaauccaggagagaagccaugcuugguacacauuuagugugggaugugggguugcaguccaccgccucacuaguuguaccauggguuagugcuagccauuuuagauucacuacaccugacacauauuccucagcugguuauauuacaugcugguaccagaccaacuuuguaguaccugauaguacuccagauaacgccaaaauggugugcaugguuucugcaugcaaagauuuuugcuuaagauuagccagagauacuaaccuacacacacaagaaggaguacucacacaaaacccaguugaaaauuauauagauaguguauuaaaugaaguucuuguggugccaaauauccaaccuagcacaucugugucaagucaugcagcgccugcauuggaugcugcggaaaccggacacaccagcucuguucaaccugaagauaugauugaaacuagauauguuauaacugaucaaacaagggaugaaacaaguauugagaguuucuuagguaggucaggguguaucgcuaugauagaauuuaauacaaguagugauaaaacugaacaugauaaaauugguaaaggauucaaaacauggaagruuagucuucaagaaauggcacaaaucagaagaaaauaugaauuauucacauauacaagauuugauucagagauaacaauagucacugcagccgcagcucaaggaraugauaguggacauauaguauugcaauuuauguauguacccccaggagcaccuguccccgaaaaacgugaugauuacacauggcaaucaggaacaaaugcaucuguguucuggcaagaaggacaaccauaccccagauucacaaucccuuuuaugagcauugcaucagccuauuacauguuuuaugaugguuaugauggugauagugcagcaucaaaauacgguucuguagucacuaaugauaugggaaccauauguguuagaauagugacauccaaccaaaaacaugauuuaaauauugugugccgcauuuaccacaaggccaaacauauaaaagcaugguguccucgcccaccaagggcuguugccuaucaacacacacacucaaccaauuacauaccauccaauggugaggccacaacucagauuaaaaccagaccugauguuuuuaccguuacaaacgucggaccaucuaguauguuuguacauguggguaacuuaaucuauagaaaucuucaucucuuuaauucugaucuugaugauucuauucuuguaucauacuccagugaucuaaucauauaucgaacaaacacugaagguaaugaugugaucccuaauugugauugcacugaauguacauauuacugccaccacaaagauagguauuuuccuaucagaguuacugcacaugauugguaugagauucaagaaucagaauauuacccaaaacauauccaauauaaucuccugauuggagaggguccuugugaaccaggagauuguggaggaaaacuauuguguaaacaugguguuauagguaugauuacagcuggaggugaaggucacguugcuuuuauugaccugagaaaauuccagugugcugaggagcaaggguuaucugauuauguggaacaucuuggucaagucuuugguguaggcuucguagacagcaucaaacaacagguaaacuuuaucaaccccacuaguaaaauugguucaaaagugauuaaaugguuguugaggauaguuucagcuaugauaauaaugguaaggaauaguucugauccacaaacuguaauugccacucucacccuucuagguuguucaggcucaccauggagguuucuuaaagagaaacucugugcguggcuccagcuuagcuauguacauaagcagucugauucauggcucaagaaauuuacugaagcguguaacgcagcacgugggcuagaguggauuggacaaaagauaucuaaauuuauagauuggauaaagaguauguuaccacaggcucaauugaaaauugauuaccuaaccaaauuaaaacaacuuaaucucuuagagaaacaaauagaaacaauuagacuugcaccugcuaguguucaggagaaaauuuucauugaaauaaacacccuucaugauuuauccuuaaaauucuuaccacuguaugcaucugaagcacguagaauuaagaauuuauauaucaaaugcaguaauguuauuaaagggggaaagaggaaugaaccaguugcaguucuaauacaugguucuccugguacuggaaaaucucuugccacuucuguucuugcucgaaugcuaacuguugagacugauauauauucuuugcccccagauccuaaauauuuugauggguaugaucaacagaguguuguuaucauggaugauaucaugcaaaauccuaguggugaagacaugacuuuguuuugccaaaugguaucgagugucccuuucauaccuccuauggcagaucuuccagauaaaggaaaaccauuuacauccaaguuuguacuugcaagcacuaaucacacucuacuaacaccaccaacaguaucuucauuaccagcaauggcaagaagguuuuacuuugaucuagacauucaaguuaagaaagaguaucuuuuagauggcaaacuagauauagcaaaaagcuuucgaccaugugauguuaauacuaaaauaggcaaugcuaagugcuguccauuuaucuguggaaaagcuguagaguuuaaagauagaaauucauguacaaccuugucuuuaucucaauuguauagucauauaaaggaagaagauaggagaagaagcagugcagcacaagcaauggaggcuauauuucaagguauagaccuccaaucuccuccaccuccagccauagcugaccuccuuaggucugugaaaacaccagagaucauuaaguauugccaagauaauaauuggauuguuccagcagaguguucuauugaaagagauuuagggauagcaaauaugacuauagguauaauagcuaauguggucucuauaguagguguuaucuauauaauuuauaaauuguucuguacacuucaggguccauacucaggggaaccuaaacccaaaagcagagcuccagagagaagaguaguuacucagggcccagaggaagaguuuggucgcucacuacucaaacauaauugcuguguugugacaaccgacaaaggcaaauucacaggucuuggcauauaugaccaagucaugguacuuccaacacauucugacccaggcucugagaucuugguagauggaguaaaaguuaaggucucugauuccuaugauuugcauaaccaugaggguguuaagcuagagaucacaguugugaaauuaauuagaaaugagaaguuuaaagacaucagaaaauauuuacccucacgugaagaugacuauccugcuuguaaccuugccuuacuagcuaaucaagaugagccaacaauaauaaguguuggugaugcaguaucuuaugguaacaucuuauugagugguaccaauacugcacgaaugaucaaguaccacuacccgacaaaagcuggauauuguggggguguuuuguacaagguuggcucuauucuugguauacauguugguggcaaugguagagauggauuuucugcaaugcuucucaaaucuuauuuuggugaaacccaggguuuaaucacuaaagaacuuccuguaucuguaaagaacuuaccauccauacauguuucaucuaaaacccgacuacaaccuaguguuuuucaugauguuuucccuggaacaaaagagccugcaguucuuaguaguaaugauccaagacuagaaacugacuuugacucagcacuuuucuccaaauauaaagguaauccugcuugucaagugaccccacacaugaaaauugcuguagcacauuaugcagcacaguuaucuacacuagacauaaauccucaaccccuuucauuggaagagaguguguuugguauugagggauuagaagcuuuggauuuaaauacuagugcaggauuuccuuauguuucacugggaauaaagaagaaagaucuuauagauaaaaagaccaaagacaucacaaaacuuaggaaagcaauugaugaauaugguauugauuugccuaugguuacuuuucugaaagaugaacuuagaaagaaggaaaaaauaaaagauggaaagacuagagucauagaagcuaauagugugaaugauacuguguuauucagaaguguauuuggaaaucuuuucucugcuuuccacaaaaacccagguauagucacugguucagcaguagggugugacccugaaguauucuggucaacuauaccucucaugcuagauggagaauguuuaauggcuuuugauuauucaaacuaugaugguagccuacaucccguuugguuuaaaugucuuaguaugcucuuagaagacauagguuucuccucucaacuuauuaaccagaucuguaacucuaaacauauauacaaaucuaaguauuaugaaguggaaggagguaugccaucuggaugugcugguacuaguauuuuuaauacaauaaucaacaauauuaucauuagaacuuugguacuagaugcuuauaagaacauagaucuagauaaacugaaaaucuuagcauauggggaugaugucaucuuuucuuauaauuuuaaacuugacauggcaguucuugccaaagaaggagaaaaauauggacuaacaaucaccccugcugauaagucugauguuuuccaagaauugaccuauaaaaauguaacuuuucuuaaaagaggauucagagcugaugagcgccacucuuuccuuauacacccuaccuuuccuguggcugagauucaugacuccaucagauggaccaaaaacccuucauguaugcaggaacacgugcuaucuuugugucauuuaauguggcauaaugguagacaugcauaccaggaauucauuaaagguauacgcaguguaucugccggucgggcacuguauauaccagcuuaugaaguucuugaacaugaaugguaugaaaaauuuuagauauaaaacuguuaaauauagcuaguuuauuaguuuuau

SEQ ID NO: 71 - RNA, 7124 nt, Human rhinovirus
uuaaaacuggguucagguuguucccaccugaaucuccuacauggaguuguacucuauuaucccgguaauuuuguacgccaguuuuauccuccccuccccauguaacuuagaagcuguacacaacgaccaacagguaacauucauccagaguguuaaaggucaagcacuucuguuuccccggucaaaguugauaugcuccaacagggcaaaaacaacugcgaucguuauccgcagagcaacuacgcaaagcuuaguaccacuuucaaugguguauggcuggucgcuccacuauaaacccaauaguagaccuggcagaugaggcuagaaacuccccacugguaacaguguucuagccugcguggcugccugcgugcccuuuugggcacgaagccuuacauuugacaaggugcgaagagccccgugugcuugcuuugaguccuccggccccugaauguggcuaaccuuaacccugcagcuagugugugcaauccagcacauggcuagucguaaugagcaauugcgggaugggaccaacuacuuuggguguccguguuucuuguuuuucuuuuauauuugcuuauggugacaauauauauagaauauauauauuggcaucaugggcgcucagguaucaagacaaaauguuggaacacacucaacacaaaauucagucucaaaugguucaaguuuaaauuauuuuaauauaaauuauuuuaaggaugcugcuucuagcggcgccucaaaauuggaauuuucucaagauccaaguaaauuuacagacccugucaaagauguacuugaaaaagguauaccuacauuacaauccccaucugucgaagcaugugguuauucagacaggauuauucaaauuacaaggggcgauuccacaauuacaucacaggauguugccaaugcugugguagccuaugguguuuggccacauuaccugacaccgcaggaugcuacugcuauugacaaaccaucccguccagacaccucaucuaauagauuuuacacuuuggaaaguaagacuuggacggggaguucaaaaggguggugguggaaauugccagaugcgcucaagggcaugggaaucuuuggugagaauauguuuuaccauuuccuuggcaggagugguuacacaguacauguucaauguaaugcaagcaaauuucaccaaggcacacuuauuguggcuaugaucccagaacaccaauuggcaagugcuuuggcaggaaauguaacagcuggauacaacuugacacauccuggugaagggggcagaaccguugaucaaacaaauagagagaaucaguccaaacaacccagugaugacaguuggcuuaauuuugaugguacauuauuagguaacauaacaauuuuuccacaucaauucaucaaccuuagaagcaauaauucugcuacaaucauaguaccuuauguaaaugcaguaccuauggacucuaugcucagacacaacaacuggagcuuaguuauuaucccaauauguccauuagaauccaugcaaguuccuaacacagugccuauuacaauuucuauuaguccuaugugugcugaauucucuggagcucgugcaagaagucagggacugccagucaugauaacaccugggucagggcaauuuuugaccacagaugacuuucaaucaccuagugcuuuaccgugguuccauccaacuaaagagaucucuauaccuggacaaguuagaaauuuaguugaguuaugccaaguagacacauugauuccaauagauaguguagaggccaaugccaagaauacaaguauguauacaguuacuuugaguagagaaacagaguuagcaaaggaaaucuuugcaauaaagguagauauugcaucacacccucuugcaacuacauuaauuggugaaauagcuaguuacuauacccauuggacagguaguauccgcuuuaguuuccucuucugcgguacugcaaauacuacucuaaaauuauuacuggccuacacaccuccugguauuagaaaaccucgggauagaagagaagccauguugggaacacauguuguaugggauguagguuugcaaucaacuauuucaaugguuguccccuggguuagugcuagucauuacaggaacacuacaccggauaaauauucuuuagcaggauuuguaacauguugguaccaaacaaaucucauagucccaccuaauacaccaacaacagccaaaauguuguguuuuguuucagguuguaaagauuuuugucugagaauggcacgggacacaaaccuacauuugcaaaguggcccuaucacacaaaauccaguggaaaauuauauagaugaaguccuaaaugagguauugguugucccuaauauuaaggaaaguaaaccuucaacuucaaacucagcgccagcuuuagaugcagcagaaaccggacauacuagugauguccagccagaagaugugguagagaccagauacgugcaaacaucacaaacaagagaugaaaugaguguugaaaguuuucuagggagaucagguugcauucauaugucaaaauuaguuguaaacuaugauaauuaugaugaaaacaacuuccauaaauggcaaauuaaccugcaagagauggcacagauuagaagaaaauuugaauuguuuacauaugcuagauuugauucugaaauuacaauaguaccaucuauagcuggcaagggcaaugauauuggacauguugugaugcaauacauguauauaccaccuggggcaccaguaccugagaagagggaugauuaugcauggcaaucaggcacuaaugcaucuaucuuuuggcaacauggacaaacauacccuagauuuucacuuccuuucuuaaguauagcuucugcauacuauauguuuuaugauggauaugauggugaccaaacugauucgagauaugguaccauuguuacuaaugauaugggaaccuuauguuauagaauaguuacagaugaacaugcccacaaaauagagaucacuacaagaauauaccauaaagcaaaacacauuaagguuugguguccaagaccaccuagggcaguugaauacacacacacucauguaacaaacuacaaacaugcaacacgugaacuuaagacugcaauuaggcccaggaaaacaaucacaacagcaggacccagugacauguauguacauguugggaaccuuauauacagaaauuuacaucuuuuuaacucugaaauguaugauucugucuuaguguccuacucaucugauuuagucauauaccguacaaacaccacaggugaugacuauauaccaacaugugauuguacagaagcaacuuauuacugcaaacauaagaauagauauuacccuauuagagugaccagucaugacugguaugagauacaagaaagugaauauuauccaaaacacauucaauacaacuugcuaauaggugaagggccaugugaaccaggugacuguggaggcaaauuguuauguaagcauggagucauuggcauaauaacagcugguggugagggacauguggcuuuuauugaccuuagacacuuccauugugcugaagaacaagggauaacugauuacauacacaugcuuggugaggcuuuugguagcggguuuguggauaguguaaaggaucagauaaaugcaauaaacccaauaaacaacauaagcaaaaagauaaucaaaugguugcuuagaauaauaucagcaauggucauaaucauuagaaauucaucagauccccaaacaauaauagcaacauuaaccuugauuggcugcucuggcucuccauggagguuucuuaaggaaaaauucuguaaauggacccaguuaaauuauguucacaaggagucagauucuuggcuuaagaaauuuaccgaaauguguaaugcagcucgggguuuagaauggauuggcaacaaaauaucaaaauuuauugaauggaugaaauccaugcugccucaggcgcaacucaaaauuaaguaccucgcagaacuuaaaaaauuaaauuuucuggaaaaacaaauugaacacuugagaguugcagacucaaaaacacaagaaaagauaaagugugagguagauacucugcaugacuugucuuguaaauuucuuccacuuuaugcuagugaggcaaagaggaucaaagccuuacacaauaaguguaaugugaucauuaaacaaaagaaaagaugugagccaguagccguuguaauucauggugagccuggcacugggaagucaaugacaacuaacuuccuggcaaggaugauaacaaaugacagugauauauacucuuuaccaccagaucccaaauauuuugauggguaugaucaacaaaguguagucauaauggaugacaucaugcaaaacccaaguggugaagauaugacacucuuuugccaaauggucucaaguguuacuuuuauaccaccaauggcagaucuaccugacaaagggaaaucauuugauucuagauuugucuuguguagcacuaaucauggaauguuagcaccaccuacaaucacguccuugccagcaaugaauagaagauucuuucuagacuuagauauuguagugaaugacaaauauaaggauucucaaggaaaauuaaauguuucugcugccuuccaacccugugauguugaugcaaaaauuggaaaugcacggugcuguccauuuguaugugguaaggcaguaauguuuaaagacaggaauacuugcaraucauacacauuagcacaaguguacaauacaauacuugaugaagauaaaagaagaagacgagucauugauguuaugucugcaauauuccaaggcccaauaacccuugagggacccccuccagcugcaauaaaugaccuccuuaaaucuguuaggacaccugaagucaucaaauauugugaagguaacaaauggauaguuccagcugaauguaaaauagaaagagacuuaaauguagcuaauaccaucauuacaauuauagcaaauauuauaagcauaucugguauaaucuauguaauauauaaauuauuuugcacauuacaaggaccuuacucaggggaaccuguaaagaagaccaaaauuccugaaagaagaguuguugcccaagguccagaggaagaauuuggccgaucacucaucaaacacaacucauguguuguuacuacacaaaaugguaaauuuacugguuuagguaucuaugauagaguaauuauugucccaacacaugcugauccugguaaggaaauacagauugauggcauuaguacaaagguugaagacucauaugauuuauacaacaaagauggaauuaaauuggagaucacuguucucaaauugaagaggaaugaaaaauuuaaagacauuagaaaguauauaccagaaagugaagaugauuacccagauuguaaccuugcucuaucugccaaucaaccugaaacuaccauaauuaauguuggagacguaguaucauaugguaauauuuuguuaagugguaaucaaacugcaagaaugcuuaaauacaacuacccaacaaaaucggguuauugugguggcauccuauacaaaauuggccaaguccuuggaauccacguagggggcaaugguagagaugguuuugcagcaauguuacugagaucuuacuuuucugagacacagggacaaauaacauccacaaaaacuacacaugaaugugccuuaccuaguauacacacuccuaguaaaacaaaauuacaacccaguguauucuaugauguguuuccagguaguaaagaaccagcaguccucucugaucaugaucccagguuagaaguugauuucaaagaagcauuauuuucuaaauauaaagggaauaaccaaugugugaugaaugaccauauaaaaguagcaaucucucauuacucagcacaauuaaugacauuagauauugauccaaaacccaucucuauagaggauagugucuuugguauagagggccuugaggcauuagaucuuaauacuagugcaggguucccauaugucaccauggguauaaagaaaagggacuugaucaauaaacaaacuaaagacaucacuaaacuuaagauggcaauggauaaguaugguguugauuugccaaugguuaccuuucugaaagaugaacuuagaaagaaggaaaagauaucugcuggcaaaacuagaguuauagaagcuaguagugugaaugacacuguccuauuuagaacaacauuuggaaaucucuucucaaaguuccacuugaauccaggaguuguaacagguucugcuguagggugugauccugagacauuuuggucaaaaauaccugugauguuagauggagagugcauaauggcauuugauuauacaaauuaugaugguaguauacacccaauuugguuccaagcucucaaagaaguauugacaaaucuuggguuugagucaaauuuaauagauagauuauguagauccaaacauaucuuuaaaaacauguauuaugaaguugagggugguguaccaucaggauguucugguacaaguauauucaauacaaugauaaacaauguuaucauuaggacacuaguuuuggaugcauauaaaaauauugauuuagauaaacuuaagauaauagcuuauggugaugaugucauuuucucauacaaguaccagcuugacauggaagcaauugccaaugaaggaaagaaauauggucuuacaaucacaccugcugauaaaucuagugaguuuaaacaauugaguuaugaaaaugucacuuucuuaaagagaggguuuaggcaagaugagaaacacuccuuccuaauacauccaauuuuuccaauugaagaaauacaugaguccauacgauggacaaagaaaccaucucagaugcaagagcauguuuuaucacuaugucacuuaauguggcauaaugguaaagauguguacaagcaauuugaacagaagauacgcaguguuagcgcuggucgugcacuguauauuccuccuuaugaugugcucuugcaugagugguaugaaaaauuuuaaauuguuuagauauagaaguaauaaacaauuaguuuuuuaguuuuau

SEQ ID NO: 72 - RNA, 7221 nt, Human rhinovirus
uuaaaacagcggauggguuucccaccauccgacccacuggguguaguacucugguacauuguaccuuuguacgccuguuucuccccucccucccaaccuauacaaucccggcaacuuagaagauuugaacuauuguacaauaggcgcugucacauccaguggcggcuaguacaagcacuucuguuuccccggagcggaguauagauggccaccgcugucaaaagcucuuaaccguuauccgccaauuaacuacgcaacggcuaguaauaucauguaacuuuuaggguguucgaucaggugaguguaccccucacuagucuggucgaugaggcugagaauuccccacgggcgaccgugucucagccugcguggcggccagcccagcuuaugcugggacgccuuaauugugacauggugugaagacccacgugugcuuaauugugaguccuccggccccugaaugcggcuaaccuaaacccuggagccuugaaacacaauccaguguuagcaaggucguaaugaguaauuccgggacgggaccgacuacuuuggguguccguguuuccuuuuauuuuuaaguuguucuuauggucacaauauaaguaauauauauugugaucaugggugcacaagugucuacacagaaaagugguucgcaugagaaucaaaacaucuugacaaauggcucaacacaacacuucacagucauuaacuauuacaaagaugcugcaagcucaucgucugccagucagucuuuuucaauggauccuuccaaguuuaccgagccugucaaagauauuaugcuaaaaggagcaccugcuuugaacucucccaacguggaagcauguggauacagugacaggguacaacaaaucacgcuuggaaacucaacaauuacaacucaagaggcagcaaaugcagucguagccuaugcagaauggcccaguuauuuggcagacagugaugcaagugauguaaauaagacuucaaagccugacacgucaguauguagauuuuauacuuuagacagcaaaacauggaccagagaaucuaaaggaugguguuggaagcuuccagaugcacuaaaagacaugggaguauuuggacagaacauguucuuucaugcuuuggggagaacaggauauaccauucaugugcaauguaaugccaccaaguuccacagcggaugucuuuugguaguuguuguuccugaacaccagcuagcaucacacacagaagggaaugugucuguuaaguacaaguacacgcauccaggugaacaaggcauagaacuaagcaauuuggcugaagaagggggagcaucacaugacccaguauauucuaugaaugguacuuuaauagggaaccucuugauuuuuccacaucaguuuaucaaucuuagaacaaauaacacugcuacgaucauugugccuuacauaaauucaguaccaauggacuccaugaccagacacaauaaucuaucccuauuaguuauuccaguuguaccguuaauaaauccaguaggaauguccacaauaauaccaauuacaguaaccauugcccccauguguacagaauuuucaggcauuagaucacaagccgugaagauacagggcuuaccuaccuuaaccacccccggaucuggccaguuuuuaacaacagaugauagacaaucacccagugcaaugccaaauuacgaaccaaccccaccaauacacauuccuggugaaguucacaaucuauuagaaauuauacaaguagacacucuuauuccuaugaacaacaaagguaccacugauaccuuggaagaguaccgcaucccacucacaguugacaagaaagaugggcaaauauuuggcaccagauuguuuauaggggaugggguguucaaaaccacacuguuuggagaaauugcacaguacuauacccacuggucagguuccaucagaaucucccuaauguauacaggccccgcacuaucaagugcuaaauuaauuuuagcauacacuccaccuggaacugaaggaccuaaauccagaagagaagcaaugcuuggcacgcauguugucugggaugucggucuucaaucaacgguugucaugaacauaccauggacaucuggugugcaauucagguauacagauccugacacauacacuagugcuggucaccuuucauguugguaucaaacaucccucauucuaccaccagauacaacaggugcugugcaccuuuuggcauucauuagugcguguccagauuucaagcuaaggcuuausaaagauacccagacaauaucacaaacagaagcucucacggaaggguuugaaggugaguuggaagaaguuguuauugacaaaaugaaacagguaacagcuucaagccagagugggucaaaauauacccaaaaggugccagcacuaagugcuaaugaaacuggggccaccuuaccaacagacccgucugacaauguggaaaccagaaccacguacaugcauuauacuggaucagagaccaccuuagagaauuucuuagguaggucagcuuguguucauauaacagagauucagaacaaauuacccauaaaacccacagaagagggcggcaacaugaaaaacacucacaaggaacaaaaauuauuuaaugacuggaaaauaaauuuauccaguuuggugcaauuuaggaaaaagcuagaacuuuucacauaugugagguuugauucugaguauacaauauuagcaacugccucacaaccugaaacagcccaauacgccaguaauuuaacaguacaagcaauguacgucccuccaggugcaccaaaucccauuaaaugggaugauuacacguggcaaagugcuucaaaccccaguguuuucuucgagguuggcaaaauggcuagguucaguguacccuuuauagguauugcaucagcuuacaacuguuuuuaugauggauacucacaugauaaugaagacacaccauaugguauaaauguccugaaccacauggguaguauagcauuuaggauagucaaugaucaugacguacacacaacccuugucaagauaaggguuuuccacagaccuaagcacauuagagcuuggauaccaagaccacccagagcauuaccuuacaccucuauaggaagaaccaacuuucccaauagacacaguaaaguuauagccacaagagacagcauuaccaccuacgggggaaacuccagguuuggagcagucuacacuugcaauuauaaaauaaugaauuaccaccugaugacgcaugaagaucauuuaaaccuuuuaacucccuacuacaauagggauuuggcagugguagcaacaggugcacaaggcucagaaauaaucccacauugcaauuguacuucaggggucuauuacucccaguacuacaauaaauacuacccaauaauaugugauaaacccacaaauauauggauugaaggaggaaacuacuaccccaguagauuucaauccggggucaugaaagguguugguccagcugaacccggggauugugguggaaucuugcgauguguacauggcccaaucggccuguuaacagcaggcgggagcggguauguaugcuucgcagauauuagacaguuagaccucauugcugagacacaggguauuacugauuacauaacaagcuugggaaaggcauuugguguggguuucacagaccaaauaucagcaaaaguuucagaacuucaggacagugucaaggauuauauaaauguuaaaauacucuccaaaguuguuaaaaugauaucugcauuggugaucauaugcagaaaucaugaagauuuggucacagucaccgccacauuggcauugcuuggaugugacgggucgccuuggagauuucucaagauguacauaucaaagcauuuccaggugcccuauauagaaagacaagccaaugauggaugguucaggaaauucaaugaugcuugcaaugcagccaaaggucuggaauggauagcaaacaaaaucuccaagcuaauagaauggauaaagacaaagauaaucccacaagcaaaagagaagcuagauuuuugcaaaagacucaaacaauuagacaucauggagaggcaaauugcaacaaugcauguuucuaauccaacacaggagaaaagagaacagcuuuuuaacaacguuuugugguuggagcaaaugucccagaaguucgccccacuguacgcaguagaagcuaggaggauuaaagaguuaaaaacaaagaugguaaacuacaugcaauucaaaucuaagcaaagaacugaaccggucugcgucuugauacacggcucucccggaucagggaaaucauuaaccacguccauuauugguagggcuauagcagaaagguucaaauccacaguuuacucacuucccccagauccaaaacauuuugaugguuaccaacaacaagaagugguaauuauggaugauuuaaaccaaaacccggauggucaagacauuagcauguucugccagauggucucawcaguugauuucauaccacccauggcuagucuagacaacaaagggauuuuauucaccagcaauuucguucuugcaucaacuaauucaaauacacuuaguccuccaacaauuuuaaacccagaagcacuaguuagaagguuuggauuugacuuagauauuuguuuacauaccacauauacuaaaucuggaaaauugaaugcagcaauggcaacagaacucuguaaagacugucacaagcccagcaacuuuaauaaaugcugcccacugauaugcggcaaagcaauuagucuuguagaucgaacuuccaauguuagguacaguuuagaccaguuagucacagcaaucauaacugacuuuaauaauaaauugaaaauuacagauucacuggaaguuuuguuccagggcccuguuuacaaagauuuggaaauagacauccauagcacaccuccaccugaauguaucagugaucuacucaagucuguugauucugaggaacucagagaguauuguaaacagaagaauuggcuuaucccagagaucccaaccaauauagaaagagcaguaaaccaagcuaguaccauaauuaauaccauuuugauguuugugagcacccuugggauucuuuauguaauauacaaguuauuugcacaaacacaagguccauacucagguaaucccucacacaccaaacuaaaaccgccuacuuuacgacaaguggugguucaaggaccaaauacugaauuugcuuuaucucuucucagaaagaacauaaucaccaucacuacugcuaagggagaauucacagcacuaggaaucuaugauaggguuugcguagugcccacgcacucgcaaccugaugaugaaguauuaguuaauggacaaccaguaaagcucaaagacaaguacaaauuacuagauucagaaaauacuaacuuagaauuaacuauauuaguuuuagacagaaaugaaaaguuuagagauauaagagcauucauagcagaugauccagagggaauggaaggaacuuuagugauaaacucuaauaacuuuaaagauaccauauuggaaguagggcaguuaacuuuugcuggcuuaauaaaccuuaguagcguuccaacaaaccgaaugauacgcuacgaauaucccacaagaacaggucaguguggugguguccugugcucaacugguaaaaucuauggaauucauguugguggcaauggacggcaaggcuucucagcacaacugaagaaacaauauuuuguugaaaaacaaggagcaaucaucaauaaaagaaguguaagagaauuagguuugaaacccauuaauacuccuacuaaaacaaaacuccaccccaguguauucuaugauguuuuuccagggucaaaagaaccagcagcucugaauggcucugaucccagacuggaggucaaucugcgugauucucuauucucaaaauauaaagggaacauagaaauugacaucacagagaauaugcaaauugccauugaucaguacucaggucaauugcuaucacuagacauaccuaccaaugaacuaucacucaaggaagcucuauacgggacggauggguuggaaccaaucgacauuaacaccagugccgguuacccguauguaaguuuaggaauaaagaaaagagauauacuaaauaaggacacucaagauguugcuaagauggaacacuaccuagacaaauaugguauugaccugccacuagucacauauauaaaggaugaacucagaaguaaagacaaaauuaggcuagggaaaaguagacuaauugaagcaucuagcuuaaaugauucagugaacaugagagugaaguugggcaacuuguauaaggcuuuccacacaaacccuggggugauaacugguucagcaguggggugugacccagacacauuuugguccaucauaccaugucuuauggauggucaacuuauggcauuugacuauucaaauuuugaugcuucucuguccccagugugguucaagugccuugaacagguucucuccaagcucggauucaaacacucuaaccugauccagacaauauguaauacacaccacauauucagggaugagauuuaugaaguugagggagguaugccaucaggguguucagguaccaguauuuuuaauucaaugauaaacaacauaaucauuagaacauuaauauuggauguuuacaaaggaauugaucuugacaaacucaaaguaauugccuacggugaugaucucaucguguccuauccauuugaacugcaaccagaauuacuagcacuugcugguaagaaguauggucucacaaucacaccuccagacaagucagaaaaguuugugaaaacaacaugggagaaugugacauuucugaagaggcacuuuagaccugacccucaauacccuuuccucauucacccaguaaugccaaugcaagauauacacgaauccauccgauggacgcgugaucccaaaaacacacaggaucaugugcgcucucuguguauguuagcuuggcacucaggagaggaggaauacaaaaauuuuacugaaaagauuagauccaccaacauugguaaaugucuguuaauaccagaauauaguguccuacgccgaagauggcuggaucuguuuuaaauaauauagauuugugauuugauuagaauuagaaauuuau

SEQ ID NO: 73 - RNA, 7233 nt, Human rhinovirus
uuaaaacagcggauggguaucccaccauccggcccacuggguguaguacucugguacauuguaccuuuguacgccuguuuucccccucuuguacccgcccuucaagcuccuugcccaaguaacguuagaaguuugaacauugguacaauaggaagcaucacauccagugguguacuguacaaacacuucuguugccccggagcgagguauagaugguccccaccgucaaaagccuuuaaccguuauccgccaaucaacuacguaauggcuaguagcaccuuggauuuaaguuggcguucgaucaggugguaacccccacuaguuuggucgaugaggcuaggaauuccccacgggugaccguguccuagccugcguggcggccaacccagcauccgcugggacgccaauuuaaugacauggugugaagaccugcaugugcuugauugugaguccuccggccccugaaugcggcuaacccuaaccccggagccuugcagcacaauccaguguuguuaaggucguaaugagcaauucugggaugggaccgacuacuuuggguguccguguuucuuauuuuucuugaauuuuucuuauggucacagcauauauacauuauauacugugaucaugggagcucaggugucuacacagaagagugguucacacgaaaaccaaaacauuuuaaccaaugggucucaucaaacauuuacaguuaucaacuauuauaaagaugcagcaaguucaucaucagcuggccaaucuuugucaauggauccauccaaauuuacugaaccagugaaagaucuaauguuaaaaggugcuccagcauugaauucaccaaauguugaggcauguggcuacagugauagaguucagcagaucacgcuuggaaauucaacaauuacaacgcaggaagcugccaaugcuguugucugcuaugcagaauggccggaauauuuaucagauaaugaugcaagugaugugaacaaaacuuccaaaccagacaccucagugugcagguuuuacacacuagauaguaaagauuggaguccauccucaaagggaugguguuggaaauuaccugaugcacugaaagacaugggagucuuuggucaaaacauguuuuuccauucucuuggcagaacgggauacacaauacauguucaguguaaugcuacaaaauuccauagugguugccuguuaguaguagucaucccagagcaucaacuugccucucaugacgguggaagcgucucagugaaauacaaauauacacauccaggugaucaaggaauugacuugggaacaacugaagaaaauuuuggaccagccaaagaugcaguguauaguauggauggaacuuuguuaggaaauuugaccaucuucccacaccaguucaucaaucuaaggacaaauaacacagcgacaauaguuguuccauacauaaacucagugccaauugauucaaugacccgucauaacaacguuucacucauggucaucccuauuguuccccuuauggcaccuacaggaaaugcaacaacacucccuauuacugugaccauagcuccuaugugcacagaauucucagguauuagaucuaaaacuauuguuccaaaugcaacuccacaaggguuacccaccacgacauuacccgggucagggcaguuucuaaccacugaugauaggcagucacccagugcuuuaccaaauuaugaacccacccccaggauacacauuccaggacaaguuaaaaaucuguuggaaauaauucagguugauaccuuaauacccaugaauaauaccaaaaccaaagaugaaguugacagcuaccucauaccauugacacagggucuuaaaaaugcccagaucuuuggaacaaaucuauacauaggugaugguguguucaaaaccacacuucuaggugagauugugcaauauuaugcacauuggucuggaucccucagaauuucccucauguacacuggccccgcacuauccagugcaaaacuuaccuuagcuuacacaccaccuggagcccaagguccaacuucuaggaaagaggcaaugcuugguacucacguagugugggauauugguuugcaaucuacaauagucaugacaaucccauggaccucaggugugcaauuuagauauacagauaaagauaccuacacuagugcugguuuccuaucuuguugguaccaaacuucacuuauacucccaccacaaacagcagguacaguguaucuguuaucuuucauuagugcaugcccagauuuuaaacucagauugaugaaagauacucaaacaauaucacagacuacugcacuaacagagggucuuaaugaugaauuggaggaagucauuguugagaaaacgaaacagacauuggcuucuaucacuucuggacccaaacauacucaaaguguccccacguuaacagcaaaugaaaccggugccaccaugccuacucaaccaucagacaauguugagacaagaacaaccuauaugcauuucaaugguucagaaacagauguugaaaacuuccuagguagagcagcauguguacauaugguagaaauaguuaauaaaaacccugaaggucuugaaaaccagaaagagcauaaacuguuuaaugauuggagaauaaacuuaucuaguuugguacaacuuagaaagaaauuagaguuauucaccuaugucagauuugauucagaauacacaauuuuagccacugcuucacagccaaccaguucuaaauauucuagcaguuuaacagugcaagcaauguauguaccaccuggugcaccaaaucccacaaaaugggaugauuacacauggcaaagugcuucaaaccccaguguuuucuucaagguuggugauacagcuagguuuagugugcccuuuguuggccuugcauccgcauauaauuguuucuaugaugguuacucccaugaugaugaagacaccccuuaugguaucacagugcuaaaccacauggguagcauggcuuucagaauaguuaaugaacaugaugcacacacuacugaagucaaaaucaggguuuaucacagagccaaacauguugaggcauggauuccaagggcacccagagcuuugccauaugugucaauaggacgcacuaauuauaauaaacaagcaauaguuccaguuauuaaaaagagaucauugauuacaaauuauggaauaggacccagauuugggggagucuuuacaggaaauguuaagauaaugaacuaucaucuuaugaccccagaagaucacuugaaucuaguagccccccauccaaacagagaucuagcaguaguaucaacuggugcucauggagcagagacuauaccucauuguaauuguaccucugguguuuauuauuccaccuauuauagaaaauuuuauccuauuauuugugggaagcccacaacuauuuggauugaggguggcccuuauuacccaaguagauaucagguugggguuaugaaaggugucggaccagcagagccuggagauuguggagguauccugagaugugugcaugguccaauugggcuccugacagcuggagguaguggcuauguauguuuugcagacauuagacaauuagauugcauugcugaagaacaaggccugggagauuacaucacuagcuuaggaagagcuuuuggagucggguucacagaucagauaucagcaaaggucacagaauuacaagauguagcaaaagauuuccucacaacaaagguauuaucuaagguuguuaaaaugauaucagcucuuguuauuaucuguagaaaucaugaugaucuagucacaguuacugccaccuuagcccuuuuggguugcgauggcuccccauggagguuucuuaaaauguauaucucuaaacacuuucaaguuccuuauauugaaagacaagcaaaugauggaugguucagaaaguucaaugaugcaugcaacgcugcaaaagguuuggaguggauugcaaauaaaauuucaaaacuuauagaguggauuaaaaauaaaguauugccacaggccaaggaaaaacuagauuucuguagcaaauuaaaacagcuugauauguuggaacgacaaauaaccacaaugcauguguccaaccccacacaggagaaaagggagcaacuguucaauaaugucaugugguuagagcagaugucucaaaaguuugccccccuuuaugcugcagaagcuaagagaaucagagaacucaagaacaaaauacuuaauuauaugcaguucaaaaauaaacagagaacagaaccaguguguguuuugauucauggaacaccugggucagguaagucuuugacaaccucaauuguaggccgugcacuagcugaacaccuuaacucugcaguuuacucacuucccccagacccaaaacacuuugaugguuaccaacagcaagagguggugaucauggaugaucuaaaucaaaauccagauggucaagauauuaguauguuuugucaaaugguuuccucuguugauuuuauaccaccaauggccaguuuagauaacaaaggaaugcuguuuaccagcaauuuugucuuagcauccacaaacucuaacacauugaguccuccaaccauuuugaacccugaagcacuagccaggagauuugguuuugacuuagauauuugccuacauaguacauacacuaaaaauggaaagcuaaaugcagcaaugguuacuaccauauguaaagauugucaccagccaacaaacuuuaagaaauguuguccacuagugugugguaaagcaauuagucuaguggauagagcaacaaauaucagauauaguguagaccaguuaguuucagcuauaaucaaugauuauagaaacaagauaaaaauuacagauuccuuggaggcuuuguuucaaggaccagucuauaaggaucuagaaauagauguguguaacacaccagccccagagugcauuaaugauuuacucaaaucaguagauucugaagaaguuagggaauauugcaaaaagaaaaauuggauaauaccacaaauuccaacaaacauagaaagggcaguaaaccaggcuaguaugauuaucaacacaaucuugauguuuguuaguacacuaggcauaguguauguuauauauaaacucuuugcacagacucagggacccuauucuggaaauccagcccacaacaaacucaaagccccuacauuaagaccaauuguaguacaaggucccaauacugaguuugcuuugucuuuacuuaggaaaaauauagucaccaucaccacagagaagggagaguuuacaggguuaggaguguaugaucacgucugugucguuccuacacaugcucaacccagcgagaguguucuuuugaacggacagaaagugcaucuuaaagacaaauacaaauugguugauccugaaaauguuaaccuggaacucaccauaauaguuuuagauaggaaugaaaaauuuagggauauuagagguuucauaucagaggaugcagaagggcuugaugcaucauuagugauacacuccaauaacuauacuaacaccauucuagauguaggucccauaacuauggcagguuuaauuaauuuaaguagcacaccaacaaauaggaugauuagauaugauuacccaaccagaacagggcaauguggaggaguacuguguaccacugggaagaucuuuggaauacauguuggagguaauggaagacaaggguuuucagcacaguugagaaagcaguauuuuguugccaagcagggacagguuguaacuagacagaaauuaagggaauugaacuuagcuccagugaacacuccaacaaagacaaagcuacacccuaguguauucuaugauguuuucccuggaaacaaacaaccagcuguucuuagugauaaugauccuagacuugaaguaaaauuaacagaaucccuauuuucaaaguacaaagggaauguagaaaugaagcccacugaaaacaugcuaguagcuguagaucauuaugcaggucaguuauuaucauuagauauaccuacugaugaauuaagucuuaaagaagcacuuuacgguguagauggacucgagcccauagacauaacaacaagugcugguuacccuuauguuagucuugguauuaagaaaagagacauuuuaaacaaggaaacccaggaaacugaaaagaugaaauuuuaccuugacaaauaugggauagacuuacccuuggucacauauaucaaagaugagcugagaagugcugacaaaguuagauugggcaagaguagauugauugaagccucuaguuugaaugauucaguaaacaugaggaugaaauuaggacacuuguacaaaacuuuccaucaaaacccuggugugauuacugguucagcagucgguugugauccugauguguucuggucagucauaccguguuuaauggauggacaucuuauggcuuuugauuauucaaauuuugaugcuucccuaucuccaguuugguuugaaugcuuggaaagaguguuauccaaaauuggauuuaaaugugcuucacugauucagacaauuugcaauacucaccauauuuucagagaugagauuuacacagucaaaggaggaaugccaucugguugcucuggaacuaguaucuuuaauucaaugauaaauaauauaaucauuaggacccuuguuuuagaugcauacaaaggcauagaucuagauaaacuuaagguaauugcauauggugaugauuugauuguauccuaucccuuugaguuagauccuggaguauuggcuaaucuagguaagaacuauggacugacaaucacuccaccugacaagucugagaaauuugugaaaaugacuugggaaaauuuaacauucuuaaagagauacuucagaccagaugaacaguuuccuuucuuaauccacccagugaugccuaugcaggacauacaugagucaauacgcuggacaaaagacccacguaacacacaagaccaugucaggucacuaugcauguuagcauggcacucaggucaaaaagaauaugaugaguucuugaguaaaauuagaaccaccgacauuggaaagugucugaauuugccugaguacaguguccucagaaagcgcuggcuggauauguuuuaaaucaauuagauaaguacauauagacauuuaauuugauuagaauuagaaguuuau

SEQ ID NO: 74 - RNA, 7132 nt, Human rhinovirus
uuaaaacuggaucuggguuguucccacccagaucacccaagagguguagugcucugucauuccggugaccuugcacgccaguuuuaucaccccuucccucuuguaacuuagaagaauuaaacucagaccaauaggaagcgacaagccagucgugacaggucaagcacuucuguuuccccggucaaaguugauaugcuucaccaaggcaaaaacaacagcgaucguuauccgcaagaugccuacgcaaagccuaguagugccuuugaaaauauuugucugguugcucaaguacaaccccaguacuaaaccuggcagaugaggcuggagcuuccccacugguaacaguguuccagccugcguggcugccugcacacccuuacgggugugaagccaaauauuggacaaggugugaagagccccgugugcucaucuugaguccuccggccccugaaugcggcuaaccuuaaccccacagccauugcucacaauccagugaguguauggucguaacgagcaauugugggaugggaccgacuacuuuggguguccguguuucucuuuuuuccuuuuuaauucugcuuauggugacaauauauaguguuauauauuggcaucaugggcgcucagguaucuagacagaauguuggcacacacucaacgcaaaacucaguuuccaaugguucaagcuuaaauuauuuuaacaucaauuauuuuaaagaugcugcaucuaguggagcaucuaagcuugaauuuucccaagacccgaguaaauuuacugacccugugaaggauguacuggagaaaggcauucccacuuuacaaucaccaaccguggaggcuuguggguauucugauaggauuauucaaaucacaagaggggauuccacgaucacuucacaagauguggcaaaugcaguugugggauaugguguguggccgcauuauuugaccccucaagaugcuacagcuauugacaagccaacucagcccgacacuuccucgaacagguuuuauacacuagagaguaaaauauggacaacagauucaaagggcuggugguggaaguuaccagaugcacucaaggauauggggauauuuggucaaaauauguauuaccauuuccugggcaggagugguuacacaauacauguacaauguaaugcuaguaaguuccaucaaggcacauugauaguggcugcaauaccagaacaucaauuagcuagugcacacaaagguaauguuaauacuggauacaauuacacacacccuggugaaaccgguagagaugucggcacggaaguccgugacacagcuaauuaucaaccuagugaugaugcauggcucaauuuugauggcacccuauuaggaaauauaacgauauuuccucaccaauucaucaaucuaagaaguaauaacucugcaacuuuaauacuacccuaugugaaugcuguuccuauggauucuaugcuuagacauaauaauuggagccuagugaucauuccaaucugcccuuuagagacccaaagucaagauacuacaguacccauaacaauaucuaucagcccuauguaugcagaguuuucaggagcacgugcaagaagucagggauuaccagugcucaugacuccuggcucuggccaguuuaugacaacugaugacuaccaaucucccagugcccugcccugguuucacccgacaaaagagauauucaucccaggacaaguucagaauuugucagaauuaugucagguugacacuauuauuccaaucaacaauauaucuucaaacacaacuagugugaacauguacucucucguguugacgaaggagagaccagggcacgagguuuuugcaaugaaaguagauauagcaucacaaccuuuggcaacaacaauuauuggagagauuuccaguuauuauacucauuggacugguagucuacgauucaguuucauguucugugguucagcuggcacaacacucaagcugcugauugccuacacacccccugggauagauaaaccaaccaagaggaaggaugcaaugcuaggcacacauguagugugggauguugguuuacaauccacuaucucaaugauuguaccaugggucagugcaagccauuacagaaacacaacaccugacaaauucucacaagccggguauauaacauguugguaucaaacaucacuugugucaccucccagcaccccccaacaagcuagaaugcuauguuuuguaucaggaugcaaagauuuuugcuugcgcauggccagggacacaaaucugcauaaacagauaggggcuauaacccaaaauccaguugagaaauacauugaugguguauugaaugaaguuuuaguuguuccaaauaucaaugagagucacccuagcacauccaaugcagcgccagccuuagaugcugccgaaacuggacacacaagcaauguacaaccugaggauaugauugaaacacgcuauguacaaaacacucaaacaagggaugaaaugagcauugaaagcuucuugggaagaucuggcuguauacacauagcacaucuagagaucaaguaugaugguuacaaugaugcuggcaacaauuuccaaucauggcaaauuacccuaaaagaaauggcacaaauaagaaggaaauuugaacuauuuacuuauguuagauuugauucagaaauaacuuuaguaccuugcauaucaucucaaagugcuaauauuggucauguugucaugcaguacauguauguuccuccuggagcuccaaaaccagacaaaagagaugauuauguuuggcaaucaggaacuaaugcaucuauauucuggcaacauggucaacccuacccucgauucucacuuccauuucuuaguauagccucagcauauuacauguucuaugaugguuaugaugguggaccuggcucacgcuauggcacaguggugacaaaugacaugggaacauuaugcuccaggauugugacugaggagcacaagacacagguuaacaucacuacuagaguguaccacaaagcaaaacaugugaaagcguggugcccgcgcccuccaagagcuguuggauacacacauacgcaugucacuaauuacaaaccaucugaaggggaguacaagccaccugucccaguuaggaauagccccagagacauugucacaguaggaccuagugacauguaugugcauguuggaaaccuaaucuauagaaaucuacaucuuuuuaauucugaaaugcaugacucgauacuaaucucuuauucuucugauuuagucauauaccgaacaaacacaaaaggugaugacuauaucccaacuugugauugcacagacgcaacuuauuacugcaaacauaaaaauagauacuauccaaucaaaguaaccagccaugacugguaugagauucaggagagugaauauuacccaaagcacauucaauacaaccugcuuauuggugagggaccauguaaaccuggggacugcgguggcaaguuauuaugcaagcaugguguuauagguauuauaacagcugguggugaaggccauguggcguuuauagacuugagacauuuccacugugcagaagagcagggcaucacagauuauauccauauguuaggagaagcuuuugguaauggguuuguugacaguguuagggaacaaguaaaugcuauuaacccaaucaauaauaucagcaaaaaacuagucaaauggcuacuuaggauaguuucugcuauggugauaauaauaagaaauaguucugauccacaaacaguuauagccacacuuacauugauuggauguucagggucacccuggcgcuuucuuaaggaaaaguuuuguaaauggacacaauugaacuauguucacaaagaaucagauucauggcuaaagaaauuuacagaaauguguaaugcugcuagaggucuugaauggauuggcaauaagaucucaaaguucauagacuggaugaaaucaauguugccacaagcucaguuaaaagucaaauaucuaagugaguugaagaaauuaaauuuauuggaaaaacagauugagaaccuacguggugcagacacaaggacucaagaaaagauuaaacuagaaauagacacacuccacgauuugucaugcaaauuucucccucucuaugcuagugaagcaaaaagaaucaagguacuauauaauaaaugcaauaauauuauuaaacaaaagaaaagaagugaaccaguugcugucaugauacacggcccgccuggaacuggaaaauccauaaccaccaguuuucuggcuagaauguugacaaaugagagugacauauauucgcucccaccagauccaaaauauuuugauggauaugaucaacagaguguggucauaauggaugacaucaugcaaaauccagauggagaggauauguccuuauucugucagauggucucaagugucacauuuauucccccaauggcugauuuaccugauaaaggcaaaccauuugauucuagauuuguuuuuuguagcacaaaucacucacuucucaccccuccaacuaucaccucacuaucugcaaugaacagaagauuuuuccuagauuuggauauaguagugcaugagagauauaaagauaaccaagggaaacuagaugugccaaaaucauuuaaaccaugugacguggauaacaagauuggcaaugccaaauguugcccguucauaugugguarggcuguuucauuuagagauagaaauaccugucaagaauauucacuuagucagauuuauaacaugauaauagaagaagauaaacgccgcagaaaugugguagaugucaugacagcaauauuccaagguccaauuucaaugaaugccccaccaccacccgcaauagcagauuuguuacaaucaguuagaacaccagagguuauuaaauauugugaggagaauaaauggguaauuccagcagauuguaaaauugaaagggauuugaaccuggcaaauaauauaauaacuauaauagcaaauguuauuaguauagcaggcauuauauuugucauauauaaauuguuuugcacacuucaaggcccauauucuggugaacccaaacccaaaacaaaaaccccagaaagaagaguuguugcacaggguccggaagaagaguuuggacgcucucugaucaaacauaacacauguguugugaccacagauaaugguaaguucacaggcuuaggaaucuaugauagagucaugauauugccuacucaugcugacccuggaaagacaauucaaaucaauggaauuaauacuaauguuacugacucauaugacuuauauaauaagaaugguauuaaauuagaaauuacuguugucaagcuagauaggaaugaaaaguucagggacauacguaaauauauuccagaaagagaagaugauuacccagauuguaauuuagcucuaguugcaaaucaaccagaaccaacuaucaucaaugugggcgauguaguaucuuaugguaacauacuccuuaguggugaccaaacagcuagaaugcuuaaauacaacuacccuacaaaaucaggauauugugguggggucuuauacaaaauaggcaacauucuagguauacauguaggugguaauggaaaagauggauucucagcaacuuuaauuagaucauauuuuagugaaacacaaggacaaaucacuaagaggacaagcacuaaagaauaugguuuaccaacuauacacacuccuaguaagaccaaauuacaaccaagugucuucuaugauguguuugaagggaccaaagaaccagcaguguuaacagacaaggauccacgucuugaaacugacuucaagacagcuuuguuuuccaaguauaaaggaaaucuaccaugugaaaugaaugaucauguaaagauugcuguugcacacuauucugcccaauuaaugacacuugauauugacccaaggaacaugacccucgaagauaguguauuuggagccgauggucuugaggcacuugaucuaaauacaagugcaggguuccccuacauaagcauggguaucaaaaagagggaucuuauaaauaauaguacuaaggacauauccaagcucaaaauagcacuagauaaauauggaguagaucuaccuaugguuacuuuccuuaaagaugagcucagaaagaaagraaaaauaucaacuggaaaaacccguguuauugaggcuaguaguguuaaugauacaguagcauuuagaaugguguauggcaauuuauuuucagccuuccacagaaauccuggaauugucaccggcuccgcaguagggugcgauccugagacuuuuuggucaaaaauuccugugauguuagauggugagugcauaauggcuuuugauuacacgaauuaugauggaagcauacacccuaugugguuugaagcacuuaaaaugauauuacacaauuuggaauuugaaccaaaguuaauugauagacuauguaauucaaagcauauuuacagagauucauacuaugaaguugaaggggggguaccaucaggauguucaggcacuagcauauuyaauacaaugauuaauaaugugauuauuaggacuuuaguucuagaugcauacaaguacauagaccuggauaaacucaaaauuauagcuuauggagaugauguaauauuuucuuacaaguauguuuuggauauggaggcaauugcccaggaagguguuaaauauggccuaaccaucacaccagcagacaaaucugacacuuucaaggagcuuaguuaugacaaugucacauuucucaagagagguuucaaacaggauacaaaauauucuuucuugguucacccaacauuuccagucaaagaaauucaugagucaauuagauggacuaagaagcccucacaaaugcaggagcaugugcuuucauugugucacuuaauguggcauaaugggcaagaagaguacaaugauuuugugcggaagauacgcagcgucagcgcuggacgcgcgcuguauauuccuccuuaugaaaugcugcugcaugagugguaugaaaaauucugauuuauguauauauagaaauaacaaauacuuaguuuguuaguuuuau

SEQ ID NO: 75 - RNA, 7110 nt, Human rhinovirus
uuaaaacugaguucagguuguucccaucugaacuucccacguggaguaguacacuauuauuacgguaauuuuguacgccaguuuugccucccuccccaaauguaacuuagaagauguacacaacggccaacaggcggugguuauccaaaccaucaaaggucaagcacuucuguuuccccggucaauguugauaugcuccaacagggcaaaaacaacugcgaucguuauccgcaagaugccuacgcaaagcuuaguaacacuuuggaagauuuauggcuggucguuccacuauaccccauaguagaccuggcagaugaggcuagaaauaccccacuggugacaguguucuagccugcguggcugccugcgcacccuaugggugcgaagccauacauuggacaaggugugaagagccccgugugcucaucuugaguccuccggccccugaauguggcuaaccuuaaccccgcagccaaugcacacaauccaguguguuuuuggucguaaugaguaauugugggaugggaccaacuacuuuggguguccguguuucacuuuuuccuuuauuaugcuuauggugacaauauauauacauauauauugacaccaugggcgcucaaguuuccaggcagaauguuggaacgcacucuacgcaaaacgcaguuucuggaggaucuaguuuaaauuauuuuaauauuaacuacuuuaaagaugcugcaucaucaggcgcaucuaggcuugauuuuucucaagacccuagcaaauuuacagacccagugaaagauguucuuaccaaggguauucccacacuacaaucacccacagucgaagcguguggauauucagauaggauaauacagauuacaaggggugacaccaccaucacaucacaagauauagcaaaugcaguuguugccuaugguguauggccuacauaccucaacucaaaagaugcaacagccauugauaaaccuacucaaccugauaccucaaccaauagauuuuacacauuagaaaguagagaguggagaagugauaguaaagguuggugguggaagcuaccagaugcgcucaaagacauggguguauuuggggagaauauguuuuaccauucacuagguagagcagguuauuugauucauguucaguguaaugcaaguaaauuucacucagggacucucuugguugucgcuaucccagaacaccaacuaucguaccuuggcacagguaauguaacaguuggauacaggcacacacacccaggagagaaugguagagaaauugcugaaguugcaaauaggaaugaaagacaaccaucauaugacagcugguugaacuguaauggcacauuauuggguaaugcccugauuuucccacaucaguuuauaaauuuaagaacaaacaaugcugcaacccuaauacuaccauaugugaaugcaacccccauggauuccaugcucagacacaacaacuggucauuguugauuguacccaucucucaacuuagaggugauacaaacuccauacccauuacaauuuccauuucucccauggcagcagaauucucuggugcgcgcaaucgcagugcacgaauagaagggcuaccaguuaugcucacaccagguucagggcaauuucuaacaacugaugauaugcaauccccuucaguuuuaccauacuuccacccaacucaggaaaucuuuauaccaggggaaguuaaaaacuugguggaguuaugccaaguugauaccauggucccuuuaaauaacaucaaugcuaguagaaacagaauugacauguaugcacuaccacucacgagacaaccccaauccgcuguaaaauuguuuaccaucccaauugauauugcaucaccaccacuuaauacaacacuuuugggugagauagcuucuuauuauacacacuggacugguaguauuagauuaaguuuuauguucuguggcagugcaaauucaucauuaaaguuacucauugcuuauacccccccaggagcaccagaacccacuaagagaaaggaagcaauguuagguacacauauagugugggauguaggucugcaauccacuuguucauuaauuauccccugggucucugccucucauuuccguaacaccacaccagauacauacucuaaagcugguuuuguaacauguugguaccaaacuaauuuuguuacagcuccagaugcaccuaccacugcggauaucauuuguuuggugucugcaugcaaagacuuuuguuuaagaauggcaagagauacagaucaacauacucaggugggugcuauaacacaaaacccuauugaacaauucacagaggcaguauuaaacgagguucuuguaguuccaaauacacaagccaguaauggaucuauagcaaauucagcaccagcauuagaugcagcagagacuggacacacaaguucagugcaaccugaagaucuuauagagacuagguauguaauuacagaucaaacuagguaugagacaucacuggaaucuuucuuggguagagcaggaugcauuaaaauuauugcauuagaacuagaucaugacaacuaugauaaaaauuucaggaccuggggaauaaacauacaagagaugucacaaauuagaaggaaauuugaaauguucacuuauguaagauuugauucagagauaacaauuguaccauguauugcagcuauagaaggugaccuuggacacauaguccuccaauacauguauguucccccgggugcaccucuuccagauaaaaggaugcacgaugccuggcaaaccaguacaaaugccucagucuucuggcaaguuggacagacuuaucccagauucaccauaccuuucuccaguauagcaucagcuuauuacauguucuaugaugguuaugauucagaugguuuagaugcuauuuaugguauuccuguuacaaaucacaugggcacaauaugugugagaauggugacagauaaacagaaaauuaaaacuaaaauugauucaagaauauaccugaaagcaaagcauauuaaagcuugguguccuagaccccccagagcaguuacguauaaccauauauacaaccccaauuauguuagagagggaguaacaccagaaacuaaggucaaauauagagcugaagucacaaccauuggaccuucugaaauguuuguacauacuaccaaccuuauguacaggaauuaccauuugaccccagagcaagaguuagauagugcaauucaaguaguuuacacugcagacuuagucauacaccgcacaaacgauaaaggugaugacuacaucccagauuguaauuguacagauugcuguuauuauugugcccacaaaaacagauacauaccaguuaaaguuaaguauuacaauuauuacaccauacaggagucagaauacuacccaaaacacauacaauaugacauuuuauuaggugaaggaccaucagaaccaggagacuguggaggaaaauuguuaugcaaacaugguguuauuggaaugguaacagcagguggggauaaucauguugcuuucauagaucucagaaaauacaggaucacagaagcugaagagcaagguauaacugauuauguaaaaucucuuggugaugccuuugggguagguuuuguugagcaaauuaaagagcaagugagcaacauaaauccauuaaacaaaauuagugcuaagguuauaaaaugguugauuagaguaauaucagcauuaguuauugcaguucgaagucaaggggacuuagcaacauuaucagcuacauuaguucuucuuggaugcucagauucacccuggcguuuucuaaaacaaaaaguaugccaaugguugggucuuagauaugugcacaaagaaucagaugguuggauuaagaaauuuacagagaugugcaaugcagcaaggggguuggaauggauuggaugcaaaauaucaaaauucauugacuggcugaaaucuaugcuuccacaagcucaaaacaaaauuaaguucuuacaguucacaaaacaacuacaacucaaggagaaacagauugauggauugcccuaugcaaccauuaaacagcaggaggaauaucuacaggagauggaggaaauguuagauauuucaaacaaacuauuaccauuauaccccagagaaaauaaaaugauaaaagauuuguugaaacaggcaaaaaacaugacaguagcaucaaagagaauugaaccaguggcuguuauguuucauggagauccaggaucagggaaauccaucugcacaaacauucuugcucgaaugaucacuaacccaucagacauauacucauuaccaccugauccaaaauacuucgauggauaccaccaacaaacaguugugaucauggaugaugugaugcagaacccaaacggagaagacaugaguacauucugucaaaugguaucaucaguuaacuauguaguuccuauggcugaccuaccagauaaaggcacucuguuuucaucagauuauguauucuguaguaccaaccagcauauucuaaccccuccaacuauaucaacacuaccugcccuaaaccguagacuguucuuggaucugacaaucaaggugaacccaaaauacuuagaaucagguaagcuuaauuuggauugugcucuuaaggcuugugaucaagaacagaaaauuggaaaugcacgcugcuguccuuugauaugugguaaagcugucucauuuguaaacaggaauaacaaugaggaacuaucacuaucacggguauacaaucagauuguacaugagcacaaccgccgccuaaauguaucaaaacauauggaggcgauuuuucaagguccaaucaacaugcaaucaccuccaccuccagcuauaguugauuuacuuagaucuacuagaaaugaggagguuaucaauuauuguaaaaaccagaacuggaucauuccugcugauguuaguguagagagagaguuaaacuugguaaacuuauccauaucaauauuggcaaacauaaucagcauaguuggaauuauauauauaauauacaaacuauuuauuucauugcaagguccauacagugguuugccaucaaagaaaaagacuauaccagaaaaaagaauuguuguacagggacccacaacagaauuuggucuuagccuaauuaaacacaacacauguguuguggaaacagauaaugguaaauuuacagguuugggcauauuugauaaugugcuuguaauaccuacccaugcugauccagguaaaaguguuaauauagaugggguugaaguaaaagugguagauucauaugauuuguuuaauaaagaaggagugaaacuagaaauuacagugauccucuuauccagaaaugagaaauuuagagauauuaggaaauacauaccaaauucagaggaugacuauaccaauugcaacuuagcucucguugcaaaccaagaagugccccagaucuuggagguuggugaugugguaucauaugguaacauacuacugaguggaaauaacacugccaggaugcuuaaauaugauuaccccaccaaaucaggguucuguggaggaguguuauacaaagugggucaaguaauuggaauacaugugggugguaauggaagacaaggauuuucagccaugcuacucaaaagguacuuuaaccagcaacaaggucaaauuauuauaaagaaaccagugaaggaaguagauuaucccaguauucacacaccuacuaaaacuaaacugcaacccagcauuuuccacgauguauucccuggggucaaggaaccagcaguauuaucagagaaagauccacgucuacaaguggauuuaaacacaucucuuuucucaaaauaugcaggcaacaagcaaauggaggugaaugaguauaugaaaguagcagcaucacacuaugcaucucaacuagaaacuuuagauauaccuaaucaacaaaugucaauugaagacugugucuauggaacagacaauuuggaggcauuggacuugaacaccagugcaggauuuccauauguggcauuagguauuaagaagaaagacauaaucaacaagagcaccagagacacaucaaaaaucaaaaacuguuuagauacuuauggaguagauuugccaaugauaacauaucuaaaggaugaacuuagagcaccagaaaaaguuaaaaugggaaaaaccagagugauagaagcuagcagucugaaugacacugugcacaugcgcauguuauuugguaacuuauuuaaagcuuuccaugccaauccagguaucauuacgggcugugccgugggcugugauccugagguguuuuggucuaaaauuccaccaauguuaggugauggaaguguuauggcuuuugauuauacaaauuaugauggcaguuugcauccagucugguuuaagauguuagaaguaguauuagauagguuaggauucccagguugugcuguuagaaaauuaucacacucugcucauaucuauaagggcacuuauuaugagguggaugggggaaugccaucaggaugugcugggacaucaaucuuuaauucaaugauuaacaauauuauaauuagaacaauaauauuacauggauacaagaacauugaucuggaccaguugagaauacuaacauauggugaugauauaauauucacauacccagacaagcuugacaugaguuaucuagcccaaauuggugagcaauauggcuugaggaugaccccagcugacaaaucagacacauuuaaagauuuagauuugagcacugcuaccuuuuuaaaaagagguuucaaaccagacacacaccaucccuuccugauucaucccacguacccaauucaggacauuuaugaguccauaagauggacaaagaauccaagaugcuugcaagaacauguucuuagccuggcucauuugugcuggcacaauggaccagaacaauaugcugauuuuaucgggaaaaucagaucuaucccgauaggaagaagccuguaccuaccauccuacgacguuuuguuguacgaaugguacgaaaaauuuugaaauauauacauuaguuaucuggguagcuuagguauau

SEQ ID NO: 76 - RNA, 7134 nt, Human rhinovirus
uuaaaacugggucuggguuguccccaccuagaucacccaagugguguaguacacuguuauuucgguaaccuuguacgccaguuuuauaacccccuccccaaauguaacuuagaagcuguacacaacgaccaauagaggguaaucauccagauuacuuacggucaagcacuucugucuccccgguuuacuuugauaugcuccaacagggcaaaaacaaagugaaucguuacccgcaagaugccuacgcaacgccuaguaacauccugaauuguuuaugguuggucgcucaauuacaaccccaguaauagaccuggcagaugaggcuagauauuccccacuggcgacagugaucuagccugcguggcugccugcacaccccuugugggugugaagccauaaucaugacagggugcgaagagccacgugugcucaucuugaguccuccggccccugaaugcggcuaacccuaacccugcagccauugccuacaaaccaguggguauguggucguaacgagaaauugcgggaugggaccgacuacuuuggguguccguguuucacuuuuuaccuuauauuugcuuauggugacaauauauacgaguuuauauauugacaccaugggcgcccaaguuucuagacagaauguuggaacucacucaacacagaauucuguuucaaauggaucuagucuaaauuauuucaauaucaauuauuucaaagaugcagcaucuaguggagcuucaaaacuagaauuuucacaagauccuaguaaauucacagauccagucaaagauguucuggagaagggaauuccaaccuuacaauccccuacaguugaagcaugugguuacucagacaggauuauacaaaucacaagaggagauucaacaaucacgucacaagauguugccaacgcugugguugguuaugggguuuggccucauuaucuuacaccccaagaugccacugcuauagacaaacccuccagaccugacacaucuuccaauagauucuacacucuagagagucaaacauggaguggcgauucuaagggauggugguggaaacugccugaugcuuuaaaggacauggggauuuuuggagaaaacauguucuaccauuuccuugguagaagcggauacacaguucauguccaauguaaugcuagcaaauuccaucagggcacucucuugguaguaaugauaccagaacaccaauuagcuacagcugcuggcgguaguguuucagcaggguauaauuauacacauccuggugaaaaagguagagauguugggaaggagggucgggaggcaaauguaagacaaccuagugaugauaauugguuaaauuuugauggaacauuauuggguaaucuaacaauauuuccccaccaguuuauuaaucuuaggagcaauaacucagccacuauaauaguaccauaugugaaugcuguuccaauggauucaaugcucagacauaacaacuggagcuuagucauuauacccauuugccggcuuaauagcauggguggugaaccaacuguacccaucacaauuuccauuaguccuaugugugcugaguucucuggagcaagagcaaagaaccagggauuaccaguauuacuaacaccuggaucuggccaauuuaugaccacagaugauuuccaaucccccagugcuuuaccuugguaccauccuacaaaggaaauuucaauccccggccagguuagaaaccuaauagaauuaugucaaguugauacuuuaauaccuauucacaacacagcaacuaaugcaaaaaacauaaauauguacacagugcaacuugguggugaacccaacccuaaaacuccaguuuucacaauaaggguagauauugcaucacaaccuuuggcaacuacauugauuggugagauugcuagcuauuacacacacuggacagguaguguacgguuuucuuucauguuuugugguucagcucucacuacacucaaauuguuaauugcauacacuccacccggaauuagaguuccagaaaacaggaaagaggccaugcuaggaacacaucucauaugggaugucgguuugcaaucuacugugucaauggugguuccauggauuagugcuagucauuuuagaaacacaacuccagauacauacucuuuagcugguuacaucaccugcugguaucaaacuaaguuaguagcccccccaaauacaccuacaacugcagacauguugugcuuuguaucgggauguaaggauuucugccuucguauggcgagagacacuaacuugcauaaacaaaguggacccaucgcacaaaacccuguagagagauauguagaugaagucuugaaugagguucuuguagucccuaauauuaaugaaaguuacccaacaacuuccaauucagccccagugcuagaugccgcugaaacaggucauacuagcaauguccaaccagaggauaugauugagacucgauauguucagacaucgcagacgagagaugaaaugagcauugagagcuuuuuggguagaucaggguguauacacaugucaacauuaaacauagauuaugacaauuaugaugacuccccuaagaauuuuaagguguggaaaauaaaucuacaagaaauggcucaaauucgcaggaaguuugaacuguucacuuaugcuagauuugauucagagauaacaauuguuccauguguugcugugcagaguggugauauuggucauguggucaugcaauauauguauguuccaccaggugcccccacaccugagaagagagaugacuuuacauggcaaucaggcacaaaugcaucuguguuuuggcagcacgggcaagcauauccuagauuuucacugccuuuccuuaguauugccucugcauauuacauguuuuaugauggauaugauggugacucugaaucaacacgcuauggaacaucuguuaccaaugacaugggcacuuuauguuuuagaauagugacagaggaacacaccaacaaggucaaaauuacaaccagaguuuaccacaaagcuaaacauguuaagguguggugcccgagacccccuagagcaguugaauacacaaaugugcaucucacaaauuauaaacccaacaaugagguuaccacuuuuaucaaaccuagagaaaaucuaagggauauuagaaauuuuggacccagugacauguaugugcauguuggaaacuuaauauacagaaauuuacauuuauuuaauucagagauaucugauucugugcuaguauccuacucaucagauuuagucauauaccgaacaaacacuauaggugaugacuauauaccagcaugugauugcacgcaagccacuuauuacuguaaacacaaaaauagauauuacccaauaacagucaaaagucaugauugguaugagauacaggagagugaauauuacccaaaacacauucaauauaaucuauugauuggugaaggacccugugaaccuggugauuguggagggaaauuguuguguaagcaugguguaauugggauaauaacugcugguggugaggggcauguugcuuucauagauuuaagacacuucuuaugugcugaggaacagggaguaacagacuacauacacauguuaggugaagccuuuggaaauggguuuguagauaguguaaaggagcaugucaaugcaauuaacccuguaaauagcaucagcaagaaagugauuaaaugguuacugaggauugucucugcuaugguaauaauaaucagaaauucuucagauccccagacuguugucgccacucuuacauugauugggugcucugggucaccauggagguuuuuaaaagagaaauucuguaaauggacccaauuaaauuauauacacaaagaaucagauuccuggcuuaaaaaguuuacugaaaugugcaaugcagcaagagggcuugaguggauagggaauaaaauaucaaaguuuauagaauggaugaaaucaaugcugccacaagcucaacugaaagucaaguacuuaaaugaacuuaagaaauuaaaucuuuuagagaaacagauagaaaauuuaagaagugcugacucaaagacucaagaaagaauaaagauagaaauagacacauugcaugauuuaucaugcaaguuccuuccacuuuaugcuagugaagcuaagaggaucaaggugauacauaauaaauguaacaacaucauuaaacagaagaaaaggagugagcccguugcagugaugauacaugguucaccggguacuggcaaaucuauaacaacuagcuucuuggcaagaaugauuaccaaugagagugauauauacucacuaccaccugauccuaaauauuuugacggauaugaccaacagucuguuguuauaauggaugauauuaugcaaaauccagacggugaagauaugucacuguuuugucaaauggucuccagugucacuuucaucccuccaauggcugacuuaccagauaagggaaaaccuuuugauucuagauuuguucuuuguaguaccaaucacucuuugcuagccccuccaacaauuacaucucuucaggcaaugaauagacgcuuuuuccuagauuuagauaucgugguacaugacaauuauaaggaugcacaagggaaauuggacguuuccaaagcauuuaaaccaugugaugugrakgcaaaaauagggaaugcacgguguugccccuucauuuguggcaaggcagucacauuuaaagaucgcaacacuugucuaaguuacccauugagucaaauuuacaaucuaauccuccaagaagauaagagacgcacacauguuguugaugucaugucugcaauauuucaaggaccaauaucaauggaaguaccuccccccccugccauaacagaucuauuacguucuguuaaaacaccugaaguuaucaaauauugugaaaacaauaaauggauuauuccagcugauuguaaaauugaaagggaucuaaaucuugccaauaauaucaucacaaucauagcaaauauaaucagcauagcagguauaauauauauaaucuauaaacucuuuugcucauuucaaggaccauacucuggugaaccuaaaccuaagaccaagauaccugaaagaagaguaguggcacaaggcccugaggaggaguuuggucguucccuuauuaaacauaauaccuguguaguuacuacugacaaugggaaguucacaggauuagguauuuaugacagacuuaugauuuuaccuacccaugcugauccuggaaaagaaauuucuauaaauggaauuguaacaaaaguuagugauucauaugauauguacaacaaacaagguauuaaguuagagauuacugcuguaguguuagauagaaaugaaaaguuuagagacauuagaaaguacauaccagaaggagaggaugauuauccggaauguaauuuagcuuuaguggcaaaccaaccugaaccaacuaucauaaaugugggugaugucaucucuuauggcaauauauuacuuagugguacccaaacagcacguaugcucaaauacaauuacccuacaaagucuggauacugugguggaguucuauacaaaauagggcagaucauaggaauacauguggguggaaaugguagagauggauuuucagcaauguuauugagauccuacuucagugaaacucagggugagauuaaaacaacaaagaaagucaaugaauguggauacccuaccauacacacacccgcaaaaacaaaauugcaacccaguguuuucuuugauguguucgaagguucgaaagaaccagcaguguuaucagagaaagacccucguuuaaaaacugacuucaaucaggcuuuguuuucaaaguauaaaggaaauguuaauugugauaugucugagcauaugaaaguugcuguuucacacuacucugcacaauuaaugacccuagauauagacccuaguaauauaacuuuagaggagaguguguuuggcacugaggguuuggaagcacuugauuugaauacaagugcgggcuuuccauacauuagcauggguauuagaaagagggauuuaaucaacaauaacacaaaggauauaaccaagcuaaaaauagcccuugauaaguaugguguugaccugcccauggugacauuucuuaaagaugaacuuagaaagaaggaaaagauuucagccggcaaaacaaggguuauugaagcuagcaguaucaaugauacaguagcuuuuagaaugguuuaugguaggcuguucucuacuuuccacaaaaacccaggaauuauuacagguucagcggucgggugugauccugagacuuucuggucaaaaauuccaguuaugcuugauggagagugcauuauggcauuugauuacacuaauuaugaugguaguauacacccugucugguuugaagcucuuaaacaaguucuccuaaauuuaucauuugaacauagguugauagacagacuuugcaauucuaaacacaucuucaaagauacuuacuaugagguugaagggggaauaccaucaggguguucuggcacuaguauauucaacacaaugauaaauaaugugauuauaaggacucuagucuuggaugcauacaaacacauugauuuggauaaacucaaaauaauagcauauggugaugauguuaucuuuucauauaaauacccuuuggacauggaagcaauugcucuagaaggaaauaaauauggacugacaauuacaccagcugauaaaucugauacuuuuaagaagcuugauuacaauagugugacuuuucugaaaagagguuuuaaacaagaugacaaguauccuuucuugauucaccccacuuucccaauuucugaaauucaugagucgauuagguggaccaagaaaccuucacaaaugcaggagcaugugcuuuccuugugucauuugauguggcacaauggucgcgacguguacaaggaguuugagaggaagauacgcaguguaagcgcuggacgugcacuguauaucccuccauaugaacuccucuugcaugagugguaugaaaaauuuuaacuaaauauauagaaauaauaaacauuuaguuuuuuaguuuuau

SEQ ID NO: 77 - RNA, 7207 nt, Human rhinovirus
uuaaaacagcggauggguuucccaccauccgacccacuggguguagugcucugguauuuuguaccuuugcacgccuguuuccccuuuguacccauccugaauuuccucccucugcaacguuagaaguuugugaaauuaaaaguacaauaggaagcaucacauccagugguguucaguacaagcacuccuguuuccccggagcgagguauagguuguacccacgaccgaaagccuuuaaccguuauccgccaaucaacuacauaacggcuaguaucaucauguuuuugaucuggcguucgaucaggugguuucccccacuagucuggucgaugaggcuaggauuuccccacgggcgaccguguccuagccugcguggcggccagcccagcuuaugcugggacgccuuuuuaaagacauggugugaagaccugcaugugcuugauugugaguccuccggccccugaaugcggcuaaccuuaacccuggagcccgacagcauaauccaauguuguuugggucguaaugagcaauuccgggaugggaccgacuacuuuggguguccguguuucuuuuuauucuuauauugucuuauggucacagcauauauaguauauauacugugaucaugggugcgcaagugucaacacagaagaguggcucacaugaaaaccagaacaucuuaaccaauggaucacaucagaccuucacuguuauuaauuauuacaaagaugcugcaaguucaucaucagcaggucaaucauugucaauggauccaucaaaguuuacugaaccaguuaaagauaucaugcugaaaggugcaccggcuuugaacuccccaaauguugaggcauguggcuauagugauagaguagaacagauaacuauaggaaauucaaccauuacaacucaggaagcugccaaugcaguuguggcauaugcugaauggcccaguuuucucaaagauguugacgcuagugauguaaacaaaccaaccagaccugauacaucugcuuguagguuuuacacauuggccaguaaaaccuggaacccuacaucaaaaggaugguguuggaaguugccggaugcccugaaggacaugggcauauuugggcaaaauauguucuaccauucacaaggcaggacuggguacacuauucaugugcaguguaaugccacaaaauuccacaguggcacucuauugguugucaucaucccagaacaucaauuggcuucagcagaagggggaaaugucucggugcuuuaugacaagacacacccaggagaaaacggcauugacuuaaauaccaaugaugcaaagggcccaaaaacugacccaauauacaacauggaugguacauuauugggcaauguacucauuuucccacaccaguucauaaaucugagaaccaacaacacagcuacaauaguaacuccauacauaaauucugugccaauggauucaaugacuagacacaacaauuugucacuuuuggugaucccaauaguaccaaucacagcgagcacaggaucaucucauaguauaccuauuacugugacaauugcaccaaugaaccuugaauugucuggaauuagaucuaaaacagucauaacacaaggucucccuacaacauuaacaccuggaucugaacaauuucugacuacagacgauaggcaaucuccaucagccuuaccaaacuaugaaccuaccccucucauccacauuccaggucgaguuaccaaucucuuggaaauaauacaaguggauucaaugaucccaauaaacaacauaacuuuaccagaugggguugaaaaguacagaguaccauuaaugcaaaaccagcaagaaagucaaguuuuugguuucucuuuauucuuaggaggcgauguccucaagacaacauuguuaggugaaauagcacaguauuacacacauugggcagguuccaucagaauaucuuuuauguacacagguccagcauugucuagugcuaaacucuuaguggcuuauacaccaccaggagcaccagggcccaccaccagaaaggaagcaauguugggcacccauguaguaugggauauugguuugcaaucaacuguaguaaugaauauaccuuggacugcuggugcgcaauucagauauacagacccagacaccuacacacacccagguuauguaucauguugguaucaaacuucauuaguauuaccaccagaaaccaaucagaguguauacauacuuggcuucaucagugcauguccagacuucaaacuccgccucaugaaggauaccucaucaaucucacaaucugaggcacuuacugaaggauugggugaggaacuugaagaaguaauagucgacaaagcaaaacagacuauugcuucagcauccaguaucucaaaacacacacaaaaggucccaacucuaucagcuagcgaaacuggugcaacccuuccaacaguaccaucagacaauguugaaaccagaaccacauacaugcacuaugauggcacugaaacaagcauagaaaguuuucuugguagagcagcaugugugcauguuacugauauagagaacaaguuaccaaauacaacugauaaucacaaggcccaaaaacuauuuaaugauuggaaaauaaauuuauccaguuuggugcaacuaagaaggaaacuagauauguuuacauauguuagguuugacucagaauacacuauuauugcaacuucaucacaaccagaacgugcacaguucucaaacacgcugacagugcaagcuauguucauaccaccaggagcacccaacccaauucaaugggacgauuacacauggcaaagugcuucaaaccccaguguauucuucaauguugguagaucagcacgcuuuaguguuccauauuuggguauagcuucugcguauaacaauuuuuaugauggcuacucacaugacaacaaagacacagucuauggaauaaauguacuaaaucacauggguaguauagcuuuuagaguagucaaugaaaaugauguucacuuaaccaaaguuaaaaucagaguuuaucaucgugccaagcauguuauggcauggauucccagaccucccagggcaaaaccuuaucucaaaauagguaggacuaacuauacuggaucagauaacauaauuccuaaaagaaaagguauuucaacuuauggauuuggaccaagauuuggggguguguguacagggaguauaaaaauaaugaauuaucauuuaaugacacaugaggacaccuugaaccuacaaaccccacucccagaaagagauuuggcaguagucaacauaaaugcucaugguucggagaccgucccgcaauguaauuguaccucaggaguuuacuauucaagauacuacaauaaguauuauccaguaauuugugaaaaaccuacuuguaucuggauugaggguaacaguuacuacccaaguagauaucaacagggaguuaugaaaggugugggaccagccgaaccaggagauuguggugguauacuuagauguguacauggaccaauuggacuguuaacugcaggggguggugguuucgucugcuuugcagauaucagaggucuggauauguuccgagcagaguaucaaggaauaucugauuacauuuuaaaucugggaaaggcauuugggaccgguuuuacagaucauaucagugaaaaaguuagugaacuucaaaacauuacaaugggguauuugaauacaaaaguucuuuccaaagugauuaaaauagucucagcuuuagucauuauaugcagaaaucaugaggauuuggucacuguuacugccacucuagcauuguuaggaugugaugguucaccauggagguuccugaagauguacauuaguaaacacuuucacuuacccuauaucgagagacaaucaaaugauuugugguucaaaaaguuuaaugacaugugcaaugcugccaagggguuggaauggauagcaaauaaaauaucaaaauugauugauuggauaaagaacaaaauccuaccgcaagcuagagauaaauuggauuuuugcaaaagacuuaagcaauuagauauacuagaaagacaaauugacaccuugcacaugaaucagaccaaugaaaaugacagggaaacguuauucaacaauguguugugguuggaacaaaugucacaaaaauuugccccauuauacgcuuuagaggcaaagaggaucagaucacuuaaaaauaaaauaaccaauuuuauacaguuccgauccaagcacagaacugagccaguguguguguuaauucaugguacaccaggaucgggaaaaucccuuacuaccuccuuaauugguagaucuauagcagarauauauaaaucuucaguauauucccucccaccagauccuaaacacuuugaugguuaucaacagcaggcuguaguaauauuggaugauuugaaucagaacccaaauggugaagacguaagcacauuuugccaaauggugucuucaguugauuuuauuccaccaauggcaaauuuagauaacaaaggcaugcuguuuaccaguaguuuuguauuagcuucaaccaacucccaaacucuaaacccuccaacagucuuaaauccagaggcauuggcccguagauuuggguuugaucuggacaugugcuuacacuccucauucacaaagucgggcaaguugaacgcugccauggcaugugaguuaugcaaggauugucacaaacccacaaauuucaagaaaugcuguccacuaauuuguggaaaagcccuuagcuuaguggauaggcacaccaaugucagauauaguauagaucaacuagucacagcuauccuacaagagcauaauaacaagacaaaaauaaccaauucccuugagguuuuguuucaaggcccuguguacaaagacauaaccauagauguccaugacaaaccuccaccagacuguauaguggacuugcuuaaaucaguggauagugaagaagugaggcaauacugcagggaaaagaaauggcuuauuccagaaauaccuacaaacauugacagggcagucaaucaggcaacaucuuuaauaaauacaauacuuauguucauuacuacaaugggcauuguguauaugauauacaaaauguuugcccaaacacaagggccauauucuggauuggacacuaagacuaaauuaaaggcaccaguguugcgugcaguugucacgcaaggucccaacacugaauuugcauuaucauuacucagaaagaacauugucacaauaacaacagccaaaggagaauuuacagcuuuaggaauuuaugauaggauuugcguuauuccaacacacucccaaccagaaaaugaaguacuccucaaugguuauaauauuaagauaaaagauaaauggaaacuaauagauccagacaauuugaacuuagaaauuacaguauuagaguuggauaggaaugaaaaauuuagagauaucagaauguuuauugcagaugacuuggaauguucugaagcuagcuuagugauacacucuaauaacuacaaaaacaccauaaugucuguuggacacauuaccauggcuggcauaauuaacuugagcaacacacccacugccaggaugauaagguaugacuacccaaccaaaacuggacaaugugguggaguucuauguucaacagguaaaaucuauggaauacauguuggugguaaugguaaacaagguuuuucagcacaacuaaaaaaacaguacuuugugcaaaagcagggugaaauaauuaguaaaaggaaaguacaugauuuaggauuaaaaccaauaaacacaccuagcaaaacaaaguuacuucccaguguuuuuuacaauguguuuccaggaacaaaagaaccagcaguuuuacauccaucagaugaaagauuagaaguagauuuugaagaaucuuuguuuucaaaguacaagggaaaugugaaaauagaaaucaccgagaacauguguauugcaauugaucacuaugcaggacaauugcucucauuggacauaccuaccaaagaacuuucuuuaaaagaagccuuauauggaacugauggccuagaaccuauugaccucaauaccagugcaggauacccauaugucaguuuaggaauuaagaaaagaucaauauugaauaaagaaaccaaggauacugcuaaaauggaagagugccuaaguaaauaugguauugauuuaccucuaguuacuuauauuaaggaugagcuuagagggaaggacaaggucagacuagggaaaaguagauuaauagaagcaucuaguuugaaugauucuguaaauaugagagucaaacuaggugaacuguauaaggcuuuccauaaaaacccuggaaucuugacuggaucugcuguagggugcgauccugauaccuuuuggucugucauaccaagucuucuagauggugagcuuuuagcuuuugauuauucuaauuuugaugcaagcuuaucuccaguaugguuugauugucuugaaaugguucucaaaaaguuggguuucgaaucagcugaccuaauaaagagaauaucuacuacucaucacauauucaaggaucagaucuauguuguggaggguggaaugccaucagguuguucaggcaccaguauuuucaauucaaugauuaauaacauaauuauuagaacuuuaauucuugacacauauaaaggcauugauuuggacaaauugagaauaauagcauauggugaugauauuauagcaucauacccauuugaauuagacucagagaaaauugcacaacaagggacuaaguauggcuugaccauuacaccaccagauaagucagcacaauuucauaaaauaacaugggaaaaugugacuuuucuaaaaagauauuucagaccagauaaacaguucccuuuccuaguacacccaguuaugccaaugucagacauacacgagucaaucagauggacaaaggauccaaaaaauacacaagaccauguuagaucauuguguauguuggcauggcauucaggugaaaaggaauaugacgaauuugugcgugguauccgcagcacagauauagggaaagucuugaugauuccaccuuauucaguucuuaggcauagauggcuugaaauguuuuaaacaauuuagauauauagagauuuaauuugaguagaauuuuuccucuau

SEQ ID NO: 78 - RNA, 7133 nt, Human rhinovirus
uuaaaacugggucuagguuguucccaccuaggccuccuacauggaguuguacucuauuauuccgguaauuuuguacgccaguuuuauaucccuucccccauguaacuuagaaguuugacacacugaccaauagguggcaauuaaccaaauugcuaaaggucaagcacuucuguuuccccggucaagauugauacgcucuaccagggcgaaaacaauugagaucguuauccgcaaagugccuacgcgaagccuaguaauaucuugaagaauuuaugguuggucgcuccgccauuacccaugguagaccuggcagaugaggcuagaaauuccccacuggugacaguguucuagccugcguggcugccugcacacccucacgggugugaagccauacguuugacaaggugugaagagccuagugugcucacuuugaguccuccggccccugaauguggcuaaccuuaaacccguagcuggugcacacaaaccaguguguagcuagucguaaugagcaauuacgggaugggaccaacuacuuuggguguccguguuucacuuuuuccuuuuauauuugcuuauggugacaauauauagauuauauauuggcaccaugggcgcucaggucuccagacagaauguuggcacucacucaacucaaaacucuguuucaaauggauccaguuugaauuacuuuaacauaaauuauuucaaggaugcugcuucaagcggcgcaucaaaauuggaguucucacaagacccaaguaaguucacugauccaguuaaagaugucuuagaaaaaggaauaccaacuuuacaaucacccacaguggaggcuugugguuauucagacaggauuauacaaauaacuaggggagauucaacaauaacaucacaagauguggcaaaugcuguuguaggauacggugucuggccacauuacuugacagcacaagaugccacagccauagacaagcccacgcaaccagauacaucuucaaauagauuuuacacacuugagaguaaacuauggcaugaaacaucaaaagguuggugguggaaauugccugaugcacuuaaagauauggguauauuuggugaaaauauguuuuaucauuuccuagggagaucaggauauacuguacauguacaauguaaugcaagcaaauuucaucaaggcacacuguuaguugcuaugguaccagaacaucaacuagcuagugcaagccgugguaaugucacugcaggauauaauuauacacacccuggggagcucggaagagugguuggacaagccagaacucagacuagugguaaucaacccagugaugauaauugguuaaauuuugauggcacuuuccucgguaauuuauuaauauucccacaccaauucaucaacuugagaaguaauaauucagcaacaaucauuguuccuuauguaaaugcuguacccauggauucaauguuaagacauaauaauuggagucuauuaauuauuccugugagcccuuugaagagugaucaagcauccauuagaguaccaauaacaaucucaauuaguccaaugugugcugaauuuucuggagccagagcaaaaccaacugcugcagcacaaggucucccaguuuauguuacaccaggaucuggacaauuuaugacuacagaugauuuacaaucuccaugugcuuuaccaugguaccacccaaccaaggaaauuuucauaccaggugagguuaaaaaccuuauugaaaugugccaaguugacacacucauuccaguuaacaauacaauugcaaaccuacguaauguuaauaaauaugcuguuucauugucuagucagacugauuuugcuaaagaaauauuugccauuaagguggauguggcuucccaaccccuuucaaguacacuuuuaggugaaauauguaguuacuacacacacuggacagguagccuacgcuuuaguuuuauguuuugugguacagcuaacacaacacuuaaaguacucauugcuuacacaccaccaggaaucaagaaaccugaaaacaggaagcaggccaugcuagguacacauauagugugggaugugggauugcaaucaacaguuuccuuagucgucccuuggguuagugcuagccauuuuagauacacaacuccagacacauacucugcagcagguuacauaaccuguugguaccaaacaaaccuuguguuuccaccuaacacaccaaacagugcugacauguuaugcuuuguuuccgcauguaaagauuuuugcuugcgcauggcuagagauacugacaugcacguucaagagguaccaauagaacaaaauccuguagagagauauguugaugaaguauuaaaugaaguguuaguuguuccaaacauuaaagaaagucauccagcuacaucuaauucggccccuacacuagaugcagcagaaacugggcacacuaguggaauacaaccugaggauacuauagaaacaagauaugugcagacaucacaaaccagagaugaaaugaguauagaaaguuuucuagguagggccgguuguauacaugaaucuacuaucacuauucaaaaugauguagaauauaacgaucaucauuuuagacaaugggauauaacauuacaagaaauggcacaaauucgaagaaaauuugaauucuuuacuuauguuagauuugauucagaaguuaccuuaguuccuugcauagcuggcaagggagcugacauuggacacauugucaugcaauucauguauguuccaccuggugcaccuaaaccuaaaaagaggaaugauuauacuugggaaucaagcacaaacccuucuauauucuggcagcauggucaggccuauccaagauuuucucuaccauucuugagcauugcaucugcuuacuacauguuuuacgauggguaugauggugaugcaccuggaucaagauauggaaccucagucacuaaucacaugggcacuuuguguucaagaguaguuacuggcaaacaagaacacccaguugaaaucacuacacguguguaccacaaagcaaaacacauuagagcaugguguccacgugcaccuagagcuguuccauacacacacacuagaucaacuaauuacaugccucaagauggugaaccaacaaucuuucuuaagcauagaaaagaucuuguaacagcugggccuagugauauguaugugcauguugguaauuuaauauacagaaauuuacaccuuuucaauuccgaaaugcaugacucuauucugguuucauauucuucugaccuagucauauaccgcacaaacacaauaggugaugacuacauuccaacaugugauugcacagaagcuacauauuacuguaaacacaaaaauagauauuauccaauuaaaguaaccagucaugauugguaugaaauacaggaaagugaauauuauccuaaacacauacaauauaaucuuuuaauuggagagggaccaugugagccaggcgauuguggagggaaauuacuguguaaacauggagucauuggaauaaucacugcugguggagagggacauguggcauucauugaucuuagacauuuccauugugcugaagagcaaggcauaacugauuauauucacaugcucggugaagccuuugguacagguuuuguugacagugucaaggaucaaauaaaugcuaucaacccuauuaacaacauuaguaagaaaauaaucaaauggcuucuuagaaucauaucagcuaugguaauaauaauuagaaacucaucugauccacagacaaucauagcuacauuaacuuuaauugguuguucagguucacccuggagauuccuuaaggaaaaguuuuguaaauggacucaacuaaauuauauucauaaggaaucugauucauggcuuaaaaaguucacagaaaugugcaaugcagcaagggggcuggaauggauugguaacaagauaucuaaauucauugauuggaugaaauccaugcuaccacaagcucaacuuaagauaaaauacuuaagugaauuaaagaaguuaagcuuccuugaaaaacaaauggaacaccucagggucgcugauucucaaacucaggaaaagauuaaacaugaaauugauacucuccaugaccuuucauguaaauuucucccauuguaugcaagugaggcaaaaagaauaaaaauuuuacauaauagauguaguacaaucaucaggcaaaagaaaagaugugaaccuguugcuguugugauacacggugaaccaggcacuggcaaaucuaugacuacaagcuuccuagccagaaugauaacuaaugacagugacauauacucccuaccuccagauccuaaauauuuugauggguaugaccaacaaagugugguuauuauggaugaugugaugcaaaacccaaguggagaugauaugacccuauuuugucaaaugguuucuagugucacauuuauaccaccaauggcugauuuaccagauaaaggaaaaccuuuugauucuagguuuguauuguguaguacuaaucauaauuuauuagcaccucccacaauaaccucuuuaccagcuaugaauaggagauuuuuccuugauuuagacauaauagugugugacaaauauaaagauucacaagggaaguugaauguaucugcugcuuucaagccaugugauguugacacaaaaauugggaaugccaaaugcuguccuuuuguauguggaaaggcuguugucuuuagagauagaaacacgugucaaacauacacauuaucacaaguauauaaccaaauacuuuaugaagauaaaagacgcagacagguuguggaugugauggcagcaauauuucaggguccaauaucacuugaaggaccaccaccagcagcaauaagugaucuuuuacaaucaguuagaacuccagaaguaauuaaguauugcgaguacaauaaauggauaauaccagcagaguguaagauagaaagagacuuaaauauagcaaacacuauuauuacaauuauugcaaacauuauuaguaucucugguauuauuuauguuauauauaaacucuucugcacacuucaggguccauauucaggugaaccuaaacccaaaacuaaaauaccugaaagaagggugguggcacaagguccugaagaggaauuugguagaucacucauuaagcacaacucaugugugguuaccacuucaaaugguaaauuuacaggcuuaggaauuuaugauagaacacuaaucauaccaacacaugcagacccagguaaagaggugcaaauagauggcaucacaacugaaguacaagacucuuaugauuuauauaauaaagauggcauaaaacuggaaauuacaguccuuaaacuuaaaagaaaugagaaauuuaaagacauuaggaaauauauuccagagaaugaagaugauuauccagauugcaauuuggcucuaucugccaaucaaccagagaccacaaucauuaauguuggagauguagugucauauggaaauauuuugcuuaguggaaaucaaacagcaagaaugcuuaaguacaauuacccaaccaaaucaggauauugugguggaauuuuauacaaaauuggucaagucuuggguauucauguuggugguaacgggagagauggguuugcugcaauguuguuaagaucauauuuuacagaaacacaaggucaaauuguuaccaccaaauccacuauugaguguaauuuacccagcauucauacaccuagcaaaacuaaacugcaacccaguguguuuuaugauguuuucccugguagcaaagaaccagcuguacuuucagaacaugacccuagacuagagguugauuucaaacaagccuuauuuucaaaguauaaagguaacaaucagugugaaaugaaugaacauauuaaaguagcaguaucucacuauucagcacaauugaugacacuggauauugauucaaauccaauuucauuagaagauaguguuuuuggcacagaaggucuagaagcacuugaucuuaccacuagugcuggguuucccuauguaucuauggguaucaagaaaagagauuugauuaacaaacaaacaaaagauaucacaaagcuuaaaauagcuuuagacaaauaugguguugaucuacccaugguuacauuucuuaaagaugaacuuaggaagagggagaaaauuucugcuggaaaaacacguguuauugaggccaguagcgugaaugacacuguauuauuuaggacaaccuuuggaaaucuuuucucaaaauuucauuuaaauccugggauuguuacugguucugcaguaggaugugauccagagacuuuuuggucaaaaauaccagugauguuagauggugaauguauaauggcauuugauuauacaaauuaugaugguaguauacauccaguuugguuccaagcccuuaaggaagugcuaucuaauuuaggauuucaacccaauuugauagacagauuauguaaaucaaaacauauuuucaaaaauguauacuaugaaguugagggagggguaccaucaggguguucuggaacaagcauauuuaauacaaugauuaauaauguuauuauuaggacauuaguuuuggaugcauauaaaaacauugauuuagauaaacucaaaauaauagccuauggagaugauguuaucuuuucuuauaaguaccagcuagauauggaagcaauagccaaagaagguguuaaguauggucucaccauaacuccagccgauaagucaaaugaauuuaagaaauuagauuauaguaaugugacuuuucugaaaagaggguuuaagcaagauaauaaauacucauuucugauacauccaacuuuuccaauugaugagauccaagaguccauacgauggacaaagaaaccaucucagaugcaggaacauguacuaucacugugucacuuaauguggcauaaugguagagauguguauaagcaguuugaacagaagauacgcagugugagcgcuggucgcgcacuguauaucccucccuaugaucugcuucugcacgagugguaugaaaaauuuuaaguuguuuagauauagaaauaauaaacaauuaguuuuuuaguuuuau

SEQ ID NO: 79 - RNA, 7208 nt, Human rhinovirus
uuaaaacagcggguggguaucccaccacccgacccacuggguguaguacacugguauuuuguaccuuuguaugccuguuugccaucccucccucuccucuuacccuuacccuuauuuugcgguaacuuuagaaguuuguaaaucacgcgcaauaggguauaccacauccagugguaugaagcacaagcaauucuuguuccccggagcuggauauaaacugcuaacgugguugaaaguccuuaaccguuauccgccaguuaacugcgagaagacuaguaacuccauguuuguuuuuaagcguucgaucagguggauaccccauucacuaguuuggucgaugaggcugggaaucccccacagguaacugugucucagccugcguggcggccaacccagcuuuugcugggacgcuuacugacagacauggugugaagauccuauugcgcuuaacugugaguccuccggccccugaaugcggcuaaccucaaccccggagccuugugguguaaaccaacacucgcaaggucguaacgaguaauucugggacgggaccgacuacuuuggguguccguguuuccuuuauuucuuauugauugucuccuaugguuacaaauuuacuguaaucaugggugcacagguuucaacucagaaaagcgguucucaugaaaaucagaacauucuuaccaacggcucaaaucaaacauucacagugauaaauuauuacaaggaugcagccaguucaucauccgcuggacaaucauuaucaauggauccaagcaaguuuacugaaccaguaaaggacaucauguuaaaaggugcaccagcacuaaauucaccuaauauagaagcuugugguuauagugauagaguggaacaaauaacauuaggcaauuccacaauuaccacucaagaagcagcaaacacaguuguugcuuauggagaauggccuucuuuucuaucagacaaugaugcuagugauguuaauaaaacuaccaaaccagauacuucagcuuguagauuuuauacuuuagauaguaaguuguggacacaggauucaaaaggcugguguuggaaauuaccagaugcacuuaaagacaugggcauuuucggucaaaacauguuuuaccacucacaagguaggaccggauacaccauucacguacagugcaaugccacuaaauuucauagugguugucuauuaguuguggucauacccgaacaccaacuugcaucuauagagggagcaaacgugucaguucuauaugacaaaacucacccuggugaacaggguauagaccucucuaaaacugacccaaaagguccugugagggauccccuuuacaugaugaauggcacauuaauuggcaauagucucauauucccacaccaguucauaaaucugagaacuaauaacacagcaacaauaguaauacccuauauuaacucagugcccauggacucaaugacccgacauaauaaucucucuuuaauggugauuccaguugucaauauuacugcaacuaguggaacuucuccuucaauaccaguaacaguaaccauugccccuauguucuuagaauugucuggcauacgcucaaaagcaguaauucaggguuuaccaacaguacuaacaccagguucagaacaauuuuuaacaacagaugacaggcaaucaccuagugcuaugccuaacuaugagccaacacccuuaauccacauuccaggugaggucaagaacuugcuugaaauugcacaaguagacacucuaauaccaauuaacaacacaaaaacugcuacugguuuagacauguauagaauuccacucaugcaaaauaaacaaggugaacaaguuuuuggauucagacuuuaccugggagaugguguccugaaaacaacauuguuaggugaauugagucaguacuuuacacauugggcagguucuuuacgacuauccuuuauguauacugggccugcauuaucaagugcuagauuacucauagcuuacacacccccaggugcacagggaccaacaaaacgcaaagacgcaauguuagguacacauguaguuugggauauaggcuuacaaucgacaguuguuuuaaauauaccuuggacaucaggugugcaguucagauauacagauccagauaccuacaccagugcuggauuugugucaugcugguaucaaaccucauuaguguuacccccucaaacacagcaaacuguauayauauugggcuuuguuagugcuuguccugacuuuaaacuuagauuaaugaaagacacacaaucaauuuaucaggacacagcauuaacugaggguuuggaagaagauuugguagaagucauuguugacaaaacacggcaaacgcuggcuucuauuaagagugacuccaaacauacacagaaggugccugcauuaacugccaacgaaacaggugcaacauugccaacaaaaccaucagacagcguggaaacaaggacaacacuuaugcauuacacugggucagaaacaacacuggaaaauuuccugggcagagcagcuuguguucaugugguagaaaucagaaacaagcgaccaacugaugagauagaacauaagaaggaccuuuuguucaaugauuggaaaauaaauuuaucuaguuuaguacaacucagacgaaaacuggaguuguucacauaugucagguuugauucugaauauaccauaauagccaccaguucacagcccgauggugcaaaauacuccaguaaucuuaccauucaagcaauguucaucccaccuggcgcacccaaccccauuaaaugggaugacuauacauggcagagugcaacaaaucccaguguauucuuuaauguagggaaaacagcuagguuuagugugcccuauuuaggaauagccucagcauauarcugcuucuaugauggguauucccaugaugauccaaacaccccauauggaauaaauguucucaaucauaugggcucaauagcauuuagaguaguuaaugaacaugacacacacaccacauauguuaaaauaagagucuaucacagagcuaaacauauaagagcauggauuccuagagcacccagagcuuuacaguauuugcacauuggcagaacaaauuaugaucugaauucuacaaaccccauuaaaaccagagacuccauaaguacuuauggcuugggaccuagauuuggugguguguguacuggaaauguuaaaauaaugaauuaccaucuaaugacccaugaagauaaucucaaucucauaacaccacuaccagaaagagaucuagcaguggugagucuacaaggacaugguucagaaacaguaccacaaugcaaaugcacuucuggaguuuauuauucuagguauuauaacaaguuuuacccagugauuugugaaaaaccaacauguuuauggauugaagguaauaaucacuauccuaguagauaucaacagggaguaaugaaagguauggguccagcugagccaggugauuguggugguauauugagaugcacacauggcccaauuggacucuugacugcaggugguagugguuauguuuguuuugcugauaucagagcccuugacauguuugaagcagaauaucaagguauuucagauuauauauuaaauuuagguaaagcuuuuggaacuggguucacagaacacaucagugaaaaagucacagaauuacaaaauauaucaauggguuauuugaauaccaaaguauugucuaaaauagugaagauuguuucagcacuagucaucauaugcagaaaucaugaugauuuaauaacugucacagccacauuagcacuauuggggugugauggaucaccauggagguaucucaaaauguacaucaguaagcauuuuuguuuaccauacauagaaagacaaucaaaugauuuaugguucaaaaaauucaaugacauguguaacgcagcaaaagguuuggaguggauugcaaauaaaauauccaaacucauugaaugggucaaacagaaaauuuuaccacaagcaagggauaaacuugacuucuguaaaagauuaaaacaacuggacguacuggaaagacagauagauacacugcacaugaaucagguuagugauaaugauagagaaacacuauucaauaacauuuuguggcuggaacaaaugucucaaaaguuugccccuuuauaugcaguugaagccaaaagaaucagagugcuuaaaaauaaaaugacaaauuuuauccaguucagaucaaaacaucgcacugagccaguauguguuuugauacaugguacacccgguucugguaaaucauuaaccacaucuuugauuggcagagcaauugcagauaguugugguucuucuguauacucacucccuccagauccaaaacauuuugauggcuaucaacaacaagcuguaguuauuuuagaugacuugaaucaaaauccaaauggugaagauauuaguaccuuuugucaaaugguaucaucaguugacuucauuccaccaauggcuaacuuggauaauaagggcauguuauucaccaguaauuauguauuagcauccacaaacucucaaacacuaaaucccccaaccauccuuaacccugaggcuuuggcucgcagauuugguuuugauuuagacauguguuugcacaccacauacacaagaucagggaaauugaaugcugcuuuagcaucagaauuaugcaaagauugccauaaaccaacaaauuucaaacguugcuguccuuuaauuuguggcaaggcauugagcuugguugauaggcgcacaaauguuagguauaguauagaucaauuagucacagcaaucauaacugaacaugcaaacaaaacaaaaauuucuagcucauuagaggugcuguuucaaggcccgguuuacaaagaccuaucuauugauauuacaaccacuccaccuccagaauguauuguagauuugcucaaaucuguagacaaugaagaaguuaggcaguauugucaggaaaagaaauggcucaucccagagauucccaccaauguugagagagcaguuaaccaggcaacaaauuugaucaacacuauccuuauguuuauuaccacacuuggcauaguuuacaugauuuacaaacucuuugcacagacccaagggccauacucaggucuugauaguaagucaaaauugaaaccaccaacaauuagggccguaaugacgcaagggccuaacacagaguuugcacuuuccuuacuuaggaagaauauaguaacaguaacuacuaacaaaggagaauucacaggauuggguauauaugacaaaauuuuagucgugccaacucaugcacaaccuacagaagaaguauugaucaauggguuuacuguaaaaauuaaagauaaguggaagcuaguagauccugacaauuuaaaucuggaaauaacuguucuugaauuggauaggaaugaaaaauucagagacauuagaauguucauugcagaugaaccagaaugcaacgaagcaucacuaguuauucacucaaacaauuucaaggauaccauacugucaguuggaucaacaacauuagcuggaauuauaaaucuaaguagcacacccacugcacgaaugauacgcuaugauuucccaacuaaaacgggucaaugugguggcguuuugugcucaacuggcaagaucuaugguauacaugugggugguaaugggagacaaggcuuuucagcacaacucaagaaacaauauuuugugcaaaaacaaggagaaauuguaacaaaaaggaauguaagagaacuaaauuuaaaaccuauuaacacuccaaguaaaaccaagcuacaccccaguguuuuuuuuaauguuuuuccaggcagcaaagaaccagcaguucuacauccuucugaugaacgacuggaagugaucuuugaggauucauuauuuucaaaguacaaggguaaugucaaaauggaaaugacagaaaauaugaaaguugcuguugaucauuaugcuggacaacucuuaucccuugauauuccaacacaagaacucacgcucaaagaagcccuuuaugguacagauggcuuggagcccauagauuuaaacaccagugcugguuauccauaugucaaccuggggauuaagaagagaucaauccucaacaaagaaaccaaggauacaacaaaaauggaggaauguuuaagcaaauauggaauugaucuuccuuuggugacauacauuaaagaugaacucagagguaaagauaaaaucagauuagguaaaaguagguugauagaagcaucaaguuuaaaugauucaguaaauaugagggugaaacuagguaacuuguacaaggccuuucauuuaaauccuggaauauuaacuggcucugcuguggguugugauccagauacauucuggucaaucauaccauguuuguuggauggagaguuaauugccuuugauuacucaaauuuugaugccagucuuuccccaguaugguuugaauguuuggaaaaagucuuaaguaaaauaggauuucaaugcucagaauuaauucaacaaauuugcaccacucaucauauauuuagagaccaaaucuacacaguagaagguggaaugccuucagguugcucagggacaagcauuuuuaacucaaugaucaacaauauuauaauuaggacccuaauauuagauguuuauaaaggcauagaucuggauucauugagaauaauagcauauggugaugaugucauugugucauauccuuucucuuuagauccagaaagaauugcaaggcaaggaaguaccuauggucugaccauuacaccaccagauaaaucaccagaauuuacuaaaaugaauuggaacaauguaacuuuccuaaaaagacauuucaaaccagauagugaauuuccauuucuuauacauccaguaaugccaaugucagacauuuaugaguccaucagauggacaaaagaucccaagaauacacaggaucauguuagaucacuauguaugauggcuuggcauucaggagagagugaauacaauaaguuugucgauggcaucagaagcacagacaucggcagaguauugcuaauacccucuuauucuguccuuagacguagauggcuugauuuguuuuaaauaaacuauauauagaguauaaauuuaguguagugaauuuuuccucuau

SEQ ID NO: 80 - RNA, 7140 nt, Human rhinovirus
uuaaaacugaauccagauuguucccaucuggauuuccuacauggaguuguacucuauuauuccgguaauuuuguacgccaguuuuaucaccccuucccccguaacuuagaaguuugaaacaaaagaccaauaggagguaacuauccaaguuacuauaggucaagcacuucuguuuccccggucaaaguugauaugcuccaccagggcaaaaacaauugagaucguuauccgcaaagugccuacgcaaagccuaguaguaucuugaaaagcaugugguugguugcuccgcuguaccccacaguaaaccuggcagaugaggcuagaaguuccccacuggugacaguguucuagccugcguggcugccugcgcacucuuugagugcgaagccauauguuugacaaggugugaagagccccgugugcucacuuugaguccuccggccccugaauguggcuaaccuuaacccugcagcuagugcaugcaauccagcauguggcuagucguaaugagcaauugcgggaugggaccaacuacuuuggguguccguguuucacuuuuuuccuuuuauaauugcuuauggugacaauauauagugauauauauugacaccaugggcgcacagguauccagacagaacguuggcacucacucaacacaaaacacaguaucaaauggaucuaguuuaaauuauuuuaauauaaauuauuucaaagaugcagcaucuagcggugccucaaaguuagaauucucacaagacccaaguaaauucacagacccugucaaagauguccuugagaaaggaauuccaacacugcaauccccaacaguggaagccugugguuauucagauaggaucauacagauaacuagaggugauucaacaauaacaucacaagauguggcuaaugcugugguugguuacgguguuuggccccacuaucugagugcagcagaugcaacugcuauugacaaaccuacacaaccugauacaucuucaaacagguuuuacacuuuggaaaguaaaauauggacagguaccucacaggguuggugguggaaguugccagaugcgcuuaaagauaugggcauuuuuggagaaaacauguucuaccauuaucuugguagaaguggauacacuguucauguccaauguaaugcuaguaaguuucaucagggaacuuuguuaguaguuaugauaccagagcaucaauuggcaagcgcacacaccggcaauguuacagcugguuacaauuuuacacacccuggugagaaggguagaacuguuggugaugaacgcaaacaucgcgaaaaacaaccuagugaugacaauuggcugaauuuugaugguaccuuauuaggcaaugcuuuaauauuuccucaccaguucaucaauuugaggaguaauaauucugcaacuauuauagucccauaugugaaugcuguacccauggauucaaugcucaggcauaauaacuggaguuuagugauuaucccaauuaguccuuugaaaucugaaccuggcgccagcgccuugguuccaauaacuauauccauuaguccaauguuugcugaauuuucuggagcaagagcuaagaccauugcagcaccacaagggcucccaguguauauaacaccuggaucugggcaguuuuuaacaacugaugaucugcagucaccaucugcucugccaugguaucauccuacuaaggaaauucugaucccaggugagguuaaaaauuuaauagaaaugugccaaguugauacauuaauucccauuaacaacacgauagcaaauuugaggaagguaaacauguacacaauacaguuaacuaaucaaacugaaauggcuaaggagauuuuugcaaucaaaguggauauugccucacaaccucuuucaaguacuaugauuggagaaauagcuagcuacuuuacacauuggacuggaagcuugcgcuucaguuucauguuuugugguacagcaaacaccacucuuaaauuacugcuagccuacacaccaccuggcauuaggaaaccaacaaccagaaaacaagccaugcuugguacucacauaguuugggaugugggguuacaaucaaccgugucacuuguuguuccguggguuagugcuagucacuuuagauauaccacuccagacacguacucagcagcuggcuauauaacaugcugguaucaaacaaacuuuguguucccacccaaugcaccuaauacagcagacauguuauguuuugugucagcguguaaagacuucugucugcgcauggccagagacacagacaugcauauacaaaaugaugccauacaacaaaauccaguagaaaauuauguugaaggugugcugaaugaaguacuagugguaccuaauauuagagagagccauccaagcaccucaaacucugcuccaauccuugaugcugcugaaacuggccacacuaguaaugugcaaccugaagauacaguugaaacucgauaugugcagacaucacagaccagggaugaaaugaguauugagagcuuucuuggaagaucugguuguauacacaccucaacaauuacuguaaguaaaaugaaaaauuauaaugagcacacuuuugacaaauggcaaauaacccuacaggaaauggcccaaauuagaaggaaauuugaaauguuuacauaugucagauuugacucagaaaucacauugguacccuguauugcaggaaaaggagaugacauagggcauaucguaaugcaguacauguaugugccaccuggagcuccaguuccaacaaaaagggaugauuuugcauggcaaucaggcacaaaugcaucaguuuuuuggcagcaugggcagccauucccuagaauuucuuuaccuuucuugagcauugcuucugcauacuacauguuuuaugauggauaugauggugauacacaugauucacacuaugguacuacuguaauuaaccacauggguacacuuuguaugaggauaguuacaaaucagcaagcacaugagguggaaauuacuacuaauaucuaucacaaggccaaacauguuaaagcuuggugcccaagaccaccucgggcugugccguacacacauagucacucuacaaauuacaaaccacaugagggugauguaaagauuuucauuagacccagagaugauccaaaguuuguaacugcuggaccaagugacauguaugugcauguaggcaauuugauauacagaaaucuccaccuauucaacucagagaugcaugauucaauuuuggugucauauucuucagauuuagucauuuaccgaacaaacacuacagguaaugacuacauccccaccugugauugcacugaugccacauauuauugcaagcacaaggacagguauuauccuauaaaagucacuagucaugauugguacgaaauucaagagagugaguauuauccuaaacauauccaauacaaucuuuuaauaggugagggaccaugugaaccaggugacuguggaggaaaacuauuauguaaacauggagugauuggcauaauuacugcagguggugagggucauguggcauuuauugaccuaagacaauuucauuguguggaagaacaaggaguaacugacuauguccacaugcugggugaagcuuuuggcauggguuuuguugacaguguuaaggaucaaauaaaugcuaucaauccaauuaaugguaucagcaaaaagauaaucaaauggcuucuuagaaucaucucugcaauggucauaauuauuaggaauucuucugauccucaaacaauuauagcaacauuaacuuuaauuggaugcucagguuccccauggagguuccucaaggaaaaauuuugcaaauggacacaauuaaauuauauacauaaggaguccgauucauggcuuaagaaauucacugaaaugugcaaugcagcuagggggcuagaguggauuggaaauaaaauaucaaaguucauugaauggaugaaaucaaugcuuccucaagcccagcuuaagguuaaauacuuaagugaacuuaagaaauuaaguuuucuugagaaacagauggagcaccuuagaguugcugauacacaaacucaggaaaaaaucaaacaugagauugauacucuucaugaucugucuuguaaauuucuuccacuuuaugcuagugaggcuaaaagaauuaaaauuuuacauaauaaaugcaaugccauuaucaaacaaagaaagagaugugaaccaguugcaguaguuauacauggugaaccugguacugguaaaucuaugacuacaaauuuccuugcuagaaugauuacaagugacagugauauuuauucuuuaccuccugauccuaaauauuuugauggauaugaucaacaaagugugguuauuauggaugacaucaugcaaaacccgaguggagaugauaugaccuuguuuugccaaaugguaucuaguguuacauuuauaccaccaauggcugauuugccugauaagggaaaacccuuugacucaagauuuguguuguguagcacuaaucacaauuuguuagcaccccccacaaucacaucauuaccagccaugaacagaagauuuuucuuagauuuagauauuauuguuugugauaaauauaaagauucccaagguaaauuaaauguaucugcugcuuuuaaaccaugugauguagaugcaaaaauuggaaaugcacgguguuguccauuuaucuguggaaaagcuguugucuucagagaucguaauacaugucaaagcuacacauuggcacaaguauacaaucaaauacuuguugaagacaaaagacgucggcaaguuauugaugucauggcagcaauuuuccaagggcccauuucacuugauggacccccaccggcagcaauaagugaccuacuacaaucaguuaggaccccugaagucauuaaguacugugagaacaauagauggauuauuccagcagaaugcaagguugaaagggacuuaaauauugcuaauacuauaauuacaaucauugcaaacaucauuaguauaucugggauuaucuaugucauauacaaacuguuuugcacacugcagggaccauacucaggugaaccaaaaccuaaaacuaaaguaccagaaagaagagugguggcacagggaccagaagaagaauuuggucgaucacucauuaaacauaacucauguguuguaaccacaaauaauggaaaguuuacaggauuagguauuuaugauagaacauugauuauaccuacacaugcagacccugguagagaaguacaaauugauggcauugccacaaagguagaagauucauaugaucuauauaauaaggauggaauuaagcuagaaaucacaguacuuaaauugaagagaaaugaaaaauucaaagauauuagaaaguauauaccagaaaaugaggaugauuacccagauugcaaccuggcucuuucugccaaccaaccagaaaccacuauaaucaacguuggagauguuguaucauaugguaacaucuugcuuagugguaaccaaacagcuagaaugcuaaaauacaacuauccaacaaaaucaggcuauugugguggcauuuuguacaaaauuggucaaguucuuggcauacauguuggugguaauggaagagauggguuugcugcuauguuacugcggucuuacuucucugagacgcagggucagauaauuaccacuaaaaccacacuugaauguaacuuacccagcauucauacaccaaguaaaaccaaguuacagcccaguguauuuuaugaugucuucccugguaguaaagaaccagcuguccuuucgaguagugauccuagauuagagguggauuuuaaggaagcucuauucuccaaauauaagggaaaugaacauuguguuuuaaacgaucauauuaggguagcuguuucacauuauucggcucaacuaauuacuuuggauauugauccaaaaccuauuucuuuagaggauagugucuuugguauagagggcuuagaagcccuugaccuuaauaccagugcaggauuuccuuaugugucuauggguauuaagaagagggaucugaucaauaaacaaacuaaagauguaacaaaacuuaaaauggcacuggauaaguaugggguugaucugcccaugguuacauuucuuaaagaugaacucaggaagaaagagaagauccgugcugggaagacacgugugauugaagcuaguaguguaaaugauacuguacuauuuaggacaacuuuugguaaccuauuuucuaaguuucauuuaaacccaggaauuguuacugguucagcugugggaugugauccggaaaccuuuuggucuaaaauaccuguaauguuagauggugaaugcauaauggcauuugauuacacaaauuaugauggaaguauacauccuauuugguuucaagcucuuaaagaaguguuaaccaauuuaucuuuugaugcuaguuuaauagauaggcuauguaaaucuaagcacauuuucaaaaacauguauuaugaaguugaagguggggucccuucaggauguucuggaacuagcauauucaacacaaugauuaacaacaucauuauuaggacgcugguauuggaugcuuauaaaaacauagauuuagauaaauugaagauuauagccuauggugaugauguaaucuuuucauauaaauaccaacuugacauggaggcaauugcuaaggaaggcaccaaauauggauuggcaauaacuccugcugacaaauccaauugcuucaaacaacuugauuaugauaaugugacauuuuuaaagagaggauuuaggcaagaugaaaaacaccaauuucuaauacacccaacauuuccaguugaagaaauucaagaauccauacgguggacuaagaaaccaucucagaugcaagaacacgucuuaucacugugucauuuaauguggcauaaugguagagauguguauaagcaguuugaggauaagauacgcaguguuagugcuggucgcgcacuguauauaccuccuuaugaucugcuucugcaugagugguaugaaaaauuuuaaauuguuuagauauagaaauauuaaacaguuaguuuuuuaguuuuau

SEQ ID NO: 81 - DNA, 26 bp, Artificial Sequence
  chemically synthesized primer
  misc_feature (21)..(26): "n" is a, c, g or t
gccggagctctgcagatatcnnnnnn

SEQ ID NO: 82 - DNA, 40 bp, Artificial Sequence
  chemically synthesized primer
gccggagctctgcagatatctttttttttttttttttttt

SEQ ID NO: 83 - DNA, 30 bp, Artificial Sequence
  chemically synthesized primer
gccggagctctgcagatatcttaaaactgg

SEQ ID NO: 84 - DNA, 30 bp, Artificial Sequence
  chemically synthesized primer
gccggagctctgcagatatcttaaaacagc

SEQ ID NO: 85 - DNA, 20 bp, Artificial Sequence
  chemically synthesized primer
gccggagctctgcagatatc

SEQ ID NO: 86 - DNA, 23 bp, Artificial Sequence
  chemically synthesized primer
  misc_feature (18)..(23): "n" is a, c, g or t
gccggagctcagatatcnnnnnn

What is claimed is:

1. A method of detecting a human rhinovirus in a sample, comprising detecting, in the sample, a nucleotide sequence selected from the group consisting of SEQ ID NOs: 1-80, thereby detecting the human rhinovirus in the sample.

2. A method of identifying a serotype of a human rhinovirus in a sample, comprising obtaining a nucleotide sequence of the human rhinovirus and comparing the nucleotide sequence to at least one of SEQ ID NOs: 1-80, wherein a match between the nucleotide sequence and one of SEQ ID NOs: 1-80 identifies the serotype of the human rhinovirus.
